United States Patent Application Publication US 2025/0325599 A1 - sequence listing, part 6

SEQ ID NO: 3 - DNA, 4204869 bp, Clostridium difficile (residues 2,102,436-4,204,869 of 4,204,869)
  source 1..4204869: mol_type = genomic DNA
cctaatacagcaaagatataacaagaacacagacgaacagcttgcgactattcaggaagaaatcggctctgtatatgaacactttgaggagctgtcaaagggtaaagaagatgggaggtaagatatggcatatgtaccaatccctaaagacttaaatagggtaaagacaaaggttgcttttaacctaacgaaaaggcagctcataggcttcacacttgcaggactggttggaataccagtctatttatttatgaggaagtttgtgccaaatgacatagctgtcatattccttatcgtatccacgcttcctatctttttcatcacactatttgaaaaagacggactgacatttgagaaatactttaagtacatttatcttcataagttttatcaaccgcaaaagagagtgagaaaggaggtttaccttgaacaagaaaagaaaaattcagcaaataaaactcatgcaaaacgaaaaggcattgagaagtcaaaagcgggacttaaagaaaagtaattgcaagtcaaaaaaagataagggaggaatccttgaccttatctttaagaaagaaccgaaaagatatacggtagaagataccattccctatctaaggcttttaaaaagcggaatatgccagcttgatgaaaagcacttcagtaaaagtatagcctttcaggacattaactatcagcttgccttagatgaagatagggacttgatttttaatcaatttgcaaacttcctaaactcttttgatccaagtatcagcattgagttttcatatatcaatcagctcggacgaaacgaagaaatgaagtcggcaattcagataccggataaaaaggacggtttcgacgatatacgctttgaatttagagagatgcttaaaagccagattgtaaagggaaataacggattgaaaaaatcaaagtatgtaacctttacagtggaagcggataatttagaacaggcaacatcaaaacttgaaagactggagatagatatattatcgagtcttaaaagtatgggagtaagagcagaaagcctaaacggagaagaaaggctaaagatacttcatgatgttttaaatccaaataaaacatttaaattttcctacaaagacctaaagaaaagggaaagcacaaagacatatattgtgcctgatgagtttaactttacaccgagtagatactttaagttcggcaaattcatcggagcaacaagtcattttcaaatccttgccagtgagctttcagataggatgttatccgagtttttggatattgacgataacatcaatatttcctttcatattagggcaatcgaccaatcggaagccattaagatggtaaaacgaaaaaacactgatattgataagatgaaaattgaggaaaataagaaggcggtaagaagcggttatgatatggacattcttccatcggacttaattacctatggtgaggatgtaaagagcctcttaaaagacttgcagacaagagatgagcgaatgtttgtggtaagtatcgtctttatgaactttgcaaggacagtgcaaaagctcgataacacaattgctcaaataagctccattgcaaataagcataactgtaagctgaaaagacttgaccattctcaggaacaaggtttagtgagcgtgctgcctcttggtgtaaataagattgaaatagatagaggattgacaagctcatcaacggcagtatttatgccatttaccacagaggagctttttatcaattcaagtaatagtctttactacggactaaatgccctaagccataacctgattatggcagatagaaagaaattaaagaacccaaacggtctaatcctcggaactccgggcagcggtaagtcctttagtgccaaaagagaaatggcaaatgcgattttagtaacagatgatgatgtgattatctgcgatccggaaggagagtatggaaacctcgtaaggcagtttaagggagaagtcattaaggtcagcagtaagtcgaaggattacctgaatcctcttgatataaacatgaactacggtgatggggatgcaccgctgaaagacaaggcaaactttatcatgagtatgcttgagcttgtagtaggcggtagtggtcttacagcagaagaaaagtccgttatagataggtgccttcctaaaatctatgaaaagtattttgaacatcctactcctgacaatatgccgatacttcaagacctatacgatatgttaaaagggcaggaagaaaaggtcggtaagaagctggcaacagagatggaaatctatgtatcggggtctctcaatgtctttaatcacaggtcaaatgtggatttaaataagaagctcctttgttttgatattaaggagcttggaagtcaattaaagaaaatcggtatgcttgttattcaggatcaggtgtggaataaggtgtcacaaaacagaggaaacaaggctacaaggtactatatcgacgagttccatttgcttttaaaagatgagcagacagcatcctattccgtagagatttggaaaagatttcgtaaatggggaggtattccaacaggtattacgcagaatgtcaaagacctacttatgagtaaggagatagaaaatatctttgacaatacagactttgtcttaatgcttaatcaagcatcaggagatagggagatacttgcaagaaaacttaaaatctcacttccacagctcagatatgttactaattcaaatgaaggtgagggactcttattctttggaaataccattgtgcctttcattgataagtttccgaaagatacaattttatatcagaagatgactaccaagccggaagaagtgaggtagcctatgggaaagaagctgaaaaaggattttaaggaaaggcataaggcaagccttgaaagagagatgtttcatagtaaaacagatacgatacctgaagaaagtaagctaaaacataacgatgattacagaggtaaaatcgttcatgagaaagaacggtttcaggataaagtgcatgaaaaaacaagtaaggtaagtgctgataatgaaaagtcttatggaacatccaagagaaacgaaaaatatagaacttcagataagggagacgtaaattccgcaattgaaacgggaagatcagattatattacggaggttaaggatggaaaaatctatgatcctttaggaaaagaccttgataatgacgggattatagacagatacgataatgactttagagacagcaactattttgaatcgacctatgatgtggaggataatctttcccataaagaaaaatcattagaaaattcctttaaaaatcataagactcaaaaaagcaggtacaagaggaagaactattctgaaagcctttatacaaggaaaaaggacgatgcaccaaagggaaataaggctgatgataaaaaggcgggaaaagatgctgtcagcggaaaagtttatagcagcctatcaaaagaccaaaagaaaaagctaaaaaaagacatggtaaaggtatctgccctttcaggacttgctaaaggaagtgaaactgtaagagattacttgtctcatggaagtgatgaaaatcaaggagtggaagcaggagaaaagacagcagatacaagctccaagctcattcatggcataaagaagtactctgataagaaaagagctaaaagaggctatgaccttacaaataaggactataaaatcagaaagcgtaagtcaaagttggaatttcgtgatgccaaaaaggaactgaaaaagacggatgagtataaaagagcaagtgcatataaaagatttcaaaagaaaaatcaggtaaaggcagcaatttctcgtgagaataagtcaaggcttagagatcgaattaaagagggacttatcggaacactgaaaagctcaaaggatatgattatccgaaaagcaaaaggactaatgcttattttcataggtatcattatcttagggacttttgtgattaactttgcaggaacgggaatgacaggctttatgaactctacaagctctgtgcttacaacaagctatttatcaaagccaaatgtcctaagtgaaatcaatcagaaattttcagatatggagggtgagcttcaaagtgaagttgactatgtgaaagaaaattatcctggatatgatgaatatatcttaaataatacagaatacatcggtcataatgtccatgagcttttatcctacattacatcaaggtgcggagaggtaaagagtgtatcggaagtagaatccatattaaaagaattatttgagtccatgtatgaccttgagtatagggaagaaattgaaatcagatacaggacggttacggaaacctataccgatgaagatggcaatgaatataccgaaagccacgaagaaccttatgagtataaaaaactcatcgtaacgcttcataaaaaagagatggacagtattatccgaaaggtctttgcaaactatcccgataatctaaagcactatgaagccttgttccttgcacaaggcaatatgagagaagcctttggtaattctgaccttatcagtgcaaatggaggtatcggcggtggaaaagagtatgaggcatctacggaagtacaaaagaagattgttaatgctgcatacattacgccatctccgggtgcaggctggtgtgccatgtgggtatcacaggtctatcaaaatgcaggacttggatatataggcgggaatgcctgtgatatgtaccgaaactatacctttacatcagacaggtcaaagctaaaagtgggaatgcttgtggcagttgaaagcagcagtagcggaagcagtgcagggcttacctatggtcatgtaggtatttacattggagatggaaaagtgattgataacatcggtcgaataagagtaactaccttagatgattggatagcaacattttgtaagcaccatcccgtaggattcggttttccgccaaatgtaaagaaataggaggtaacaatttgaaaaaggaacttacaacagtaaaaaacagaataaagaagttaaaggataaaaaggctctgattgatgaagaattggagcctttattcattcgtgaagaagagcttgaaaatgaagaaatcattgccatttgcagaaagaacaacatcacaatcagcgatttgatagcaaaggtaaacagacaaaaagcagaaatgaaaaaggagaaaacaaatgaaaaccagtttgaaaaagaataataagttttggacggtagcacttgcggtaattgtaagtattagttgtattttaggtctttggacggttgtttatgcacaggagcaaaaatctgaagctccaacaaaaaacgaagctgttcaaacggaagttgaagtaaatgtaaggtatatctttgaagatgaaaaggtctttaaggaagaaaagataaaggctgagaaaggacaacttattgatagcggagatcttccaatgctcccagatgatatgaaattcattgatgaatttctgttttatgaggtaaagggagatggaaaagatgagattatccgtaaggtagcaaagatggaggttaaggataaggaaacgcagacggaagaagaaaagccaaagcaggatgaatgcactcagacagaagataagggaacgcagacagagctttctaaagacgatatttcaaaaatagaaaaagaggcaaaagagcttcaggataaacttgataagttaaattgcgaacttaaggacaaagacaaattaagtgataagcaaaagaataaaattaaagaccttgaagatgaaattgatagcctgaaagaaaaaatgaagaaagataagggaaataaggacttatcagaagatatgaaaaaggaaatagataagctgacggaaaaggtgaaagagcttgagaaaaaggcaactgaaacaaataaagctcctgtaacatcacaatcagttacaccgattagtcctatttccggaattaagacaagttcaggtatttctcctcaaacaccacagacttctgtaagtagtaccggtaaaggctcatcggattcggtaagctcaggtaatactacaaaggataccggtaaaggcaaaacggaagtaaaggagaaagaaaaggaagttcgctatcccaataagttgacggcaaaagctcctgcgaataacagtcaggattcatcaatggggtctgcaagtaagagtgtaaacaccaacaagggagtagcttcatctccgtcaaaggcgagagcatccgttacggagaataaagataatgcaaataaggagtatccgattcatcatggagatagcagcgataacaaagaaacggatcagtattcggcagatgcaaggcagtttattacctttcaaacgaaaaacggtaagacttttcatttaatcatcaatcatgatgaagatagtgagaatgtaatgcttcttacggaagtatctgaagatgatttgcttaacatggtggagaaaaaagaagcaccaaagcaggaagtagtaaaagaagaacctgttaaggaagaagtaaagcctgagaagaaggacgaaaagagtaatttaggaacctatattattttgcttcttgtagtaggtggtgcattaggagcaggctactattttaaggttgtgaaaaagaaagaagataaagaacttgaagccttagaggaggaagatgatgatttcttttctgaatctgaaagcgaggaagaaataaatgatgcagatgaagtagaagatgaagaataaacgcacctaaaaacatattattttgggtgcaaagttagggcgggagagtaacatctttcgccctattttgatttataacaggaggaaaacacagatgaagttagttattgcagaaaagccgagtgttgcaatctccattgcaaaggttattggagcaaataaaaagaaagacggatattatgaaggaaacggatatagggtgagctggtgcgttggacacctaattcaaatggcaaatccggatgcttatgatgaaaagtacgccaagtggaatatggctgatttaccgattattccgagcgactacaagtatgaagtagcaaaggcaaccaagaagcagtttaacatccttaaaaagctgatgaatgataaggaggttgatacggttatcaatgcgtgcgatgcagggcgtgagggagaaagtatttttagacttgtatataatcaagtgaattgtaaaaagaagatgaaacgcctttggatttcttcaatggaagatagtgccattaaagagggttttgataacctaacagacggaaaagactatgataatctctttgaatcggcacaggcaagagctattgcggattggttagtcggaatgaatattagtaggctctactcttgtctgtatcagcaaaattacagtgttggcagagtgcagacacctacccttgccatgattgtaaaaagagatgatgagatagcaaattatcagaaagaaaaatattacacagtagagctttctatgaatggatttacactctccacagacagaattgatgatgaagttgctgctgaacagcttataagtttagtaggcgataagattgaaattactgatgttattcaaaaagaaaaaattacaaagcctgatttaccttttgacctaactacgcttcaaagggagtgcaataaatattttggatatagtgccaagcagacacttgactatactcaaagcctgtatgaaaagaaactgattacttaccccagaacagacagcagatgtttaacagaggatatgattgtgagtacagtcaacaacattttgggtaaaaatgactttgatacagagcgtatcaaggtagtatttaactctaaaaaggttacggaccatcatgcaatcataccgacaatcagttcagtaaaagaagatgtttctgaattacctttaagtgaagcaaaagtttacttccttatatccgataaatttcatgcaagtgtaggctatccgcttattgaaaatacaacaaagattgtagcttcatttgacggttttgaatttacaagttcaggtaaggtaattaaggatgaaggctttagcaaataccttaaagaatacaaatcaaaaaagagtgaagatgctgtattgcccgatgtaagtgttggtgatgttttgagcgttgaaaataaagaggttaaagaaaaatttacccaacctccgaaacactttactgaagatacgctcttaaagtctatggagattgcgggaaatgatgccttagaaaaaggtgtagaggtggaaagaaaaggtcttggcactccggcaacaagggcaggaattattgaaaatctaatctttaagagatttgtcgaaagagataagaagaatctaattgcaacgcataaaggaatcagccttgtaacgattgtagcagatacctttaagtcggcagaaacgacagcaaagtgggaaatggaattatctgatattgctcagggtaaatcctctaagaaagaatttttagatgcgattgaaaatgagataaaagaagcggttttgacatatcgcaagtaagacagcactaatttcagcgtggaaaaaatgctctaaaaatgctataatgcaaagtaatcaatttaatgattgagaggtgattatatgtctaaaataaatgttgaaggttcagaaatcagcattattgccatagacaatagagattatatttctttaacggatatggttagaaatattgagaacggttctgctttgattgaaaagtggctcagaaacaagaatacaatagagtttttaggtatttgggaagaaatgtataacacgaattttaattcccccgaattcgagggaattaaaaatgaagcaggatttaaccgttttatattatcggtcaagcaatgggtggaaaaaactaattctatcggtatcgttgcgagagcaggaagatatggtggaacttatgctcataaagatatagcgtttgagtttgcttcttgggtatcgccatactttaaattatatttaatcaaggaatttgaacgcctaaaggaagaagaacaaaagaagttaggatgggatattaagagaaatttggcaaaaatcaattatagaattcacacagatgccattaaaaacaaacttgtaccggataaactttcaaaagaaaaaatcaattttatttatgcaagtgaagcggatattcttaatgtttctctatttggaataacagctaaggagtggcgtgatgaaaatccggatttaaaaggcaatattagagattatgcggatatatcacagcttgtctgcctttctaatcttgagaatcttaatgcggtatttataaatgaaggcatgagccaatctgaaagattggaaaaattaaatgcaatagctattgaacaaatgaagatactatctgaaagtgaatcaattaaaaaattgaaatagagtaataatatttggtatatagcgaaggtgattagagtaaaatctaaccgccttttttgtttgaaaaaagaaggaggtaaaaatgcgaataaatgattttcataacattttggagctaataaaacaagatgttttgtataatgaagcagaatatctaaagctcctaaaagttgtcggaaacaatcaaaggtatgattttagaagtcaattaagtatatatgataaaaatcctgaagcgacagcctgtgccaagttcgactactggagggaacgctttaaccgaacggttatgcgagggcagaaagggataccaattttagaggattacggcacatataaaaaggtggactatatctttgatataagccagacagtttcaaaaaacagggatgtcaacgaggtcaatctttggagatttgataaagaagcccatcaagatgtcttaaaggaaatgataaaaagcgagggctatgaggaaagtgaaagcacacttgaaaacatcttttctttaagcagactctacggtgatgaaaaaatagataccttaatgaatgaacttagagtagcggatgaggatagaatatcatttaccaagtttgtaagggactcggtaagctatgcggtagcttcaagatttaagttagattatccgatggattatgagcttttaagagaaaattttcaaagatttgacagcatatccttaatgagccttggtgaaagtgtatcggatattagcggaaagattattgatgaaaccattcaaaaaagcaaagagcttgagcttcaaaaagaagttttaataggaaaagaagcgggatataataaaattaaagaagaattagaggaggtagaagaaaatgtatttcgacgagatgatcaggaaagaaatgaaaacgagcgagttctccgaaatggagagtacggacgagataatagaaaaaatcagggagaatacgctaaacagcttggaggaacagacggactttataaggaagtatccgaatccgacctacgcagtgatgaggctgaattacctttcacagagcgaggagcagagccacttcgagatgcttttggatctatacaaggagaagaagctgacaggacacctgatggatattcagaaacaggcagtagagtttatgagagcagagaagccaaagttgatagcagcttggaagatagaggacgagaacaatccgcagtatggggcgatgatttcagctctcaaagaaatgaccatcaaggaagtagtggagatttaaaagacaatacggataaagggataatagaagctgaaaaggcttctttttctttacccgaaaattcttatggacagataagccttactattccgctaactgagaaggatatagataccgtccttattaacggaggaaatcatgatggcggtaggcttcctgttattgctgagttttcaaaaggcaagagcatagaagaattgggagaatacctcaaagatacctttaaaggcggaaacggattttacattgatgaaagagaagtatcttcctggtattcggataaaggtattcatttagcttatggaacatcggcaagagaggataatacacaaattttaagttggagtgatgcagcaagtaggataaatgaacttcttgacagaggtgagtttgctacaaatgtagaacttttagaggcacaggactatgaaagggatagaatttcagaatccttatggtatctaacgcacgatttaagcgaagaaggaatagagcaaggatatttcaactcttttgaaagaggtggtggctttccgcaagaaacgaaaagattatctgaagcattaaaaaatcctgaatatctgaaagaaacaatcaaagaatatagcaggtttttagaaggatacaaagaaagcagaaatgtattaaggtatcattatcacaaggtagatagtctttatcagaagttgcaagaacttgagctgcaacgaaaggaatatagtaccaatctgacagaacttccgaaggtaaagctctttattacagaagatgaagtccttgaaagcctttcaagaggaagcggcgttgatagaggaaaagaacgaatcaccaagttttttaaagaaaatcatactttgcaggaaaaagccaatttcctaaaagatgaatatggaatcggaggacattctcacgttgtgtcaggtgcaatgggaagtgatgaatggcacgatgcaaagggttttaaattacagaagaatgattgtaatgatgtgttccttacttggacaagtgttgcaaagcatattgatgagctgctttctaaaaaactttattttgaggaaaaggaaacagaaagtacggcagagatagaagaagtaaaagaaccgcaatattattctaaaaatgatcctggaaatctaatgcctgatgaaattcttgaaagagtgccagagatttacgcacaggaggatgtagatttagcggataagcaggttcatgcagcatatattattccttttcgttcaaattggacttggtatatgacggagtatgacagggaaagcggtgatgcctttggacttgttcttggaatagagcctgaatggggatattttaaccttgaggaactgaaagaattaaatgcccagaggctcattttagaggattttccaaagacctttagagaacttaaagatatagagcttataaaacaaatggatgagcaggagcttcagtttgtctttaatggagaacttagctttgaagataaagtagagcttgaagcacctgaagaaacagaagaagctacaaagcgtggcacagttcaagctaccttatttgattacctcaaagaaagagaagaagtagaactgaatgaaaaagaggacagccttttagaagagtttgcagttaaagcaggcgataccgtctattttaatcatgaagaatataaagtcagagaaatttctaaaaatgaaatcacaggaagatatgatttgtggcttgatccggtaagaagtggaaaccatcaaattccgattgtagactttacagataatgaggacttgctgaataaaataagtcttgaaagaccgaactttattgtcggtgatgaagttaaatacaaggacaaaaaccataccataacacgctttgatgatatgagaaagaacctaaatacggtaacggtgaaggacaacaccgagtattttggcgggatgataacaagcttcgatgtcattccttatcgtctggaaagcgaccttgagagggtatttgaaaacctgacatataaacagccagagcagactactgaggaaactcaaataaggaaagcggaagctcataactttaaaattacagaagaaacgctccctgaaaagttaagtccaagcgaaaggttaaataataaccttgaagcaatttccatgcttaacagagtggagagcggacaaagagagcttgacagtacagctcaggaagttttagcaaggtatgtaggctggggcggactttccgaagtctttgatgaaagcaaggaaggtcagtggaaagaagcaagggcttttctaaatgagaacttatcacatgcagaatacgaagctgcaagagaatctactttaacgagcttttatacaccgaaaaccgtaattgacggaatatataagacgctttcggatatgggatttaaacagggaaacattttagaaccatcaatgggcatcggaaactttataggcaatatccctgatgaaatgaataagtccaagttttatggcatagaacttgactcggtaagcggtcgaattggaaaactactataccctgaaagtgaagtgcagattaaaggactggaagaaacctccttttccaataacttctttgatgcggttatcggcaatataccctttggagaatataaggtaaatgacagggagtataacaaaaataacttccttatccatgattatttctttgcgaaatccattgataaagtcagaaacggcggtattatcgcctttatcacatcaagtggaacaatggataaaaaggatgaaagtgtaagacgctatcttgcagcaagagcagagtttttaggggcaatcagacttccaaatgatacctttaagggcatagccggaacagaagtaacctcagatattatattcctaaagaaaagggacagtatcagagaaagagatgaggactggattcaccttgctgaagatgaaaatggtcttacctataacaaatattttgtagatcatcctgagcaggtactcggcacaatgcgtgaagtttcaggaagatttggaaacacacttgcgtgcctgccgaaagaaaatgccgacttaaaagagcttctgacaaaagcaagtgaagaaatatccaaaggatcaacttatgaagaaatagagcttttagatgatgaaatcacttcaattcctgcaacggatgatgtcaaaaacttttcctataccgttattgatgatgaagtctattacagagaaaactcccttttcatcaagaaagagataacggataagaataaggaaaagattaaggactatcttgaactgaatactgcccttaaagatgttatctacaagcagaaagaggactattccgatgatgaggtaaagaaagctcaagaaaagcttaatgaagtctatgacaacttttcaaagaagcatggctttataaataatttaagcaataccagagccttaaaagaggatagcaatttccctcttgtatcttccattgaaattcttgatgaagaagaaaacgtcaaggcaaagggggatattttctcaaagagaaccattacaaaagccaaagtcatagaccatgtggacacttcccttgaagctcttgtcttatcggtatctgaaaaaggctatgtggattttgagtatatggaaagccttacaggtaaagacagaccaactttgatagaagaacttagaggagaaatttatctaaacatcagagaagaacaaaacttttatagaccattatcctttaaccttgaagatggagatttgcctttcgcttgtgcaaacggcagtaattcatataagtacggctatgtaacaaaggatgagtacctaagcggaaatattagagataagattgccattgtagacagctaccttgcaaagttaagacaaacggaacgagagcttcctcatcttggctttgttgagaatggaaaagaaaaagagctgataagctatgaaatgaatcgtttggaatatcaaaaagcagagcttaccaaagttcttccaaaggaattagaagcaagtgaaatcaatgtgcgtcttggtgcgacttggataccgattaaagatattgaaaaattcatctttgaaactttaaaaactccgggatatgcaagatgggatattaaggttaaattttcaaatattacaagtgaatggaatgtagagggaaaaagcagggataaaggaaatgaccttgcagaaatgacctttggtacatcaagggtaaatgcctataagctgattgaagatgccctaaatcttaaagaaacaaaggtatttgaccagattataaatccggacggttctaaaacttctgtcttaaataaaaaagaaaccatgcttgcaggacaaaagcaggagctattaaaagaagaatttaagaactggatatttaacgatcaggaaagaagaaaccgtcttgtaaaactgtataatgagcgttttaactcaatccgaaacagagaatatgatggaagcaatctttcttttgagggaatgaatacagaaattgatttaagacctcatcaaagaaatgccatagcaagaagtctttatggaggaaacacattgcttgctcatgtggtaggcagtggaaagacctttgagatggtagcttccgcaatggaaagtaaaagacttggaatgtgcagtaagtctttgtttgttgttccaaatcacttaacaggacaaatcggtcgtgaatttatgcagctatatccgtcggctaatattatggtggctgataaaaaagactttgaaccgaagaacagaaagagatttatcggaaagattgccacaggggaatatgatgcggttgttatcgggcatacgcagtttgaaaaaatcccgatgagtaaggaatatcaggaaaagcacatccaagatcagattaatgaaatcgtaaactatgtagaagaatacaagcatgacagaaatcagaactttacagtaaaacagcttgaaaagacaaagaaaaaactggaaacaaggcttgagaaattaaatgatgattttaagaaagacgatgtaattacctttgaggaactgggagttgatatgctctttgttgacgaggcacataattacaagaacctttatctctataccaaaatgagaaatgttgcaggtatcgggcagtcagaagcctttaagtcctccgatatgtttatgaaatgcagatatatggatgaaatgacaggaggaaaaggcatagtttttgccacaggaacacctgtaagtaactcaatgacagagctttatacaatgcaaaggtatcttcagtatgagagtttaaagaaaaatcacttagagcattttgattcttgggcttccacttttggagaaacacaaagctcctttgaactatctcctgaaggaacaggatatagggtaaaaacgagattttcaaagttctataacttgcctgaactaatgagtatgttcaaggaagtagcagatattcagactgcggatatgcttaaccttcctacacctgaagctaattatgaagttattaaaactgagccttctgaagaacaaaaggaaatcctaaagagcctttctgaaagagcggatgatgtcagaaatagggttgtagagccggatgttgataatatgcttaagattaccaatgacggtaagaaacttgccttagatcagcgtttaatcaatcccctacttcctgataaccctgatagtaaagtaaatgtatgcgtaaaaaatgtatttgctatttgggataagacaaaagaaaataggtcaacacagctacttttctccgatatgtctactccaaaaggagatggagaatttaatatctatgatgatattagagaaaaacttgtagcaatgggaataccgaaagaagaaatcgcctttatccatgaagcgaattctgataagcaaaaggatgaactctttgcaaaggtaagaaaaggcgaagttcgtatcttaatgggttcaacgcagaagatgggagccggaacgaatgtgcaaaataaactgattgcacttcatgatttggatgtgccttggagaccagctgatcttgaacagcgtgcgggtagaattgtaaggcagggaaatgaaaatgagaaggtaaatatctatcgttatgttacagagaatacctttgatgcctacctttggcagacgatagagaataagcaaaagttcatttcacagattatgaccagtaagactcctgttcgtgtggcagaagatgtggacgaaagcagcttaaattacgccgaaattaaagcgttggcaacgggtgatccaaagattaaagaaaagatggatttggataatgaggttacaaaacttaaaatgcttgaagcaaactataagtctaaccgttacagattagaggataaggtggcaaaaaactatcctgaagaaatcgcaagaacagaaaagctcatagaagctgtcaaaaaagatatatccaatgtagagcctaaagcggaaggtgaagaaaagtttacttctattaccattgcgggagaaaaaattaccgataagaaattagccggagaaagattacttgaagctatttcaaaggtaaaaatcaatgaaagcaaggttataggaaagtatagaaatatggatttagaggtaagctataacttctttactaattctcataatttcagcttaaacggtgttgcaaagcatttaggagagcttggaacaagtgcggacggtaatatcacaagactggataatgcccttgagaaaatgccggagaaactaaatatgcttgaagaaaagctcataagtacaaaagaacagcttgaaaatgccaaagaggaattaaaaaagccttttgaaaaggcagatgagttgaaaactaaggtattaagacttgcagagttaaataagctgctcgatatgggagaggtggaagaaaagaaaaatgataatcctcttgtggaagatgtaaaaagagcaatcattgacttctgtaacagagagtatgaagaaaatcacagttatgatgagtttcatactctatatcctgacttaaagcatatcggtatcgcctataccaatacaccggatgaaagacatggtattcaatatgagcttaatttagaggagaaaacttggacacagtacattgatgatacgcctattaaaacagagagctttgattatgaaaataagggagaaaatgaagctctaagaaatatgaaaaatgaaattgagttatctacatttagtgatttggtttatgttgattctgaagatttaagagtagcaacgggacttgatattgacgatgagggtaacttctatgatccgtttgcaaaagaccttgataatgacggtattccggatagatatgatagtgattttaaggacagtgattattttgagtcaacttatgatgtggaggacaatcttcatagcaaagaagaaaccacacaaaaatcagatgataagccgtctatcttaggacagataagagcctatcaggaagaaagtaaaacagaagaaaaacaaaaaataaaagagcaggaatttttaagataaagggagggcaacctcccttttaccatgaaaggagataaaaacatggattacaaaacaatgagagatagagttgaagatatgttaagtgataatcataaagactttgttaaagcgattataagcatggaaaagggtatcaatgatgaaagtgctttagataagctatatgacgcttatatggacaatgatagccttaatttgctgcatgaggagtttgactatatgattgaggatttaaggggacaggggcagataaaagacctgctttatgttcgggaagaaaaggataatcttatcaatattgtcggaaatatcgttggagaagttgatgtaattgaaagggaaaataagaacggagaaacctttaaggtagcaaacttctccgtagtatctaaagatgatgagggaaataagttatatcacaactgctccgtttatggagaaaagagtgatattccaaaggactttaagcagggagattttgtcaaactctttgggcagatcagaacttccattgatgataacggcaaggagcatagcaatatcaggatactttcttcaaaactgttaaaggcaaaggaacagatgaaaggacaggaagaaaagaaagaatctatacttggagctatcaaaaaatatcaggctgaagataaggaaaaaccgaaagaaaagaaagaagcaagcaaagaagctgagagataaatttacggtcggtgtggtcttaggactgcaccggctcttttttatttatgcaagttcgattaaagagaatatatttatgaaaaaagtatattttgtggtataatatactagatatagttttcttgaacggaggataagaatgagggtttttagttataaaagattgttcaaaaaactcattgatttagatatgacaaataatgaattgatggaaaaggcaaaagtgagtaaaagtacattttacaaaatgaagaatggacagaatgtaactacggatgttttgcttagaatttgtaatgctttggattgtgatattgaagatattatggagtgcgtaattattgaagatgtaaggagaatgggagtctaagtttacagtcatagatttattttcaggagctagaggatcataaaacttattgttaaattattgcttgaaaaaatattaagggatgtagcataaaaaatttatgattgtgattaaacaggaaactcataactgtatttatatagttatcaatatttatattctaaaatcatgatttttatattagataaagaagggggataaaatgtcaattaggaaattaaaaataaagaattttaaatgcttttcagattggtttatagttgattttgaaaatgggattaatatattagttggcaataatggaacaggtaaatctacaattttggaagctattaatctggttttaactggaacttatcatgggaaaaatattaggaatgaacttactcagtaccttttcaataagaatatagtggaaaactatattagagaagtcaacgaaggagtgaatgtagaacctcctaaaataattattgaagcgtattttgatgcagaaatgccaagttttttaggtgatggaaattctgaaaaaactaaagacacccctgggatttgtttatcaattagttttgatgaaaaatatagcaatgagtataaaatgctttgtaagaacaagataacatcgttgccaattgaatattatgaggtaagttggatgtcttttgccagagaaaatataactgcaaggagcattccaattaagtctgcaatgattgatacgacaagctatactcctaccagtgggtcagatatatacatatcgagaatagtaaagaatctgttagatgataatgaaattattaatatatcgcaagcgcataggcttatgaaagaacaattttctagagatgagaatattgctaatataaatagaaaattaacggaaacatcaaataacgaattgacaatttctgtagatttcggtacgaaaacttcatgggaaagcagcttggtaacccaattaaatgaaataccatataataacattggtaaaggtacacaatgtattgttaaaacacaattggcattaagtgatcataaaatagaaaataagcagattgtgcttttagaagaacctgaatgccatttgtcatattcaaacttaaatattctcctagataaagtaaatgagtcagtaaaagaaaaacagataatagttactacgcatagtagttttgtatcaaataaattaggacttgaaaatttaattttactaaatcgaggaaaaacactacggctaggtgatttatcaaatgaaacaaatttattttttaaaagaattgcaggttatgatacgttacgattattattatcaaataaagcaattttagtcgaaggtgattcggacgaactaattgttcaaagagcatatatggactctcataatggtaaattgcctattaatgatggaatagatataatatcggttggaatttcttttttaagatttttggaaatcgcaaaattgctagaattacgtgtgtcagtgataaccgataatgatggaaatattgatgcactaaatagaaaatatagcgattatttaggagataattgttgtgagaatataaatatatattttgatgatagtacccatgaatataatggttctttggaaaattacaactataatactttggaaccgtgtatatatagatcgaattccatgtctattttaaacgagatattgaataaatcatatgaagatccagatgatttacttaaatatatgaaggggcataaaacagaagttgctttaaagatttttgaaagtgataaagctatagaatttccacaatatataaaggagggtattctaatatgagtgggaaattatatatagctgctgctggatctggaaaaacaagaaaaattatagaggattctcttaatactcataaaaaaatactaatcctaacatatactattacaaatgagcaacaaataattagccgaattaagaataaagttggtgtaattcctaataatattacagtttctacatggttttcttttttgttaaaagatggtattagaccttatcaaggaagtagatttaaggaacgaattgaaggaattatatttgtaaatggacagaacaatacgtacgtaaagaaaacatccaacaaatattttgccaaagataacagggtatatactgataaattatcagagtgtgttgtagagttaaatgataaatgtaatggaaaagtttttgaaagaatcagtggaatgtatgactgtatatatgttgatgaagtccaagatatggtggggtatgatttggaaatattaaagtgtttaatagcttcaagaattgaagtgataatggtcggggatcctagacaatgcacatattcaactcactcatcaaaaaaatataaaaaatatagttgtgggaaaatagatgagtttttaaaaaatgagtgcagaaaattagatgtaagaattgatgaaacgacacttaattgtacttatagaaacaatgatattatatgtaaatttgcgaatagtctgtatccagagagaacatctacaaattttgtgcgtagagctgaagatgaatcagatggtgttatgataattgataaagcagatgtagagaagtatttgcagaaatttaatgcaatgcagttgagagaaaataaaaggacatccgtcaataatgaatatccatattataattttggagaatcaaaaggcttggaattccaacgagtacttatatatccgactcaaccgatgtgggattggattattaacaataacacatctctaaaagaacaaagtaaggctagattatatgttgctgttacacgtgctgagaatagtgttgttattgtacgtaaagatgcacgaccttgtagtctaccagtggtgaaattataacttttattgtgaggagatgaaatttaaatggctaatgatataaaatttgaaatttctgttccagcggatgaagagggatatgttcaattaaaatgtccaagttgtagtgaaaaatttatgttaacggtggaagatattgaggctgaaagcacaatagatatttggtgtcctaattgtggtttaacacacgagaattatttagacgatgatatttatgaattagcagaacgaatagttgaaaatcaagttgctgaaatgctaaatgatttttcaaagaatcttgaaaaaagttttaggaatagtaaaagtataaagtttaaacgtggaaaagagattaaaaaggaagcagaacttccgataggaagaaaaactggagattatgaagaaaagaaatatttgtgttgtggcaaaaccgctagaataagtagtataaaaaaattagaaggtagttattgcccgttttgtggagagatgatagatggagattagtaaaaaagaacttagaaaaatcagtagaaaatttaggatattagcttcaaatgttatgaattcatattatggagaacagaatgcaaatttggaagaaatgataaattatatagagcaaacattgttgataaaagagtatttgcatagtttagaatatgatgttgatggcttagatgacttattaaatacgataagtaattcttatggacgtaaagttttgaatcttggcaatgatagtaataaaaggacgtatctactgtatagagcattttcctttataacaggaaataatctacctacatatacttttggctggtattatgctggcagtaataaatatcaagatatggcaaaggcgtttggcgatagaatggtctatccgtttgtacttgaggttgaaaattatatgaaagatatttctaccgatatggggtacgatgaaaataatgctctatataatatcaatgttaatagttctggagttcaagtcaatattgcggaacacggaagcacgattaacgctgaccaagaaaataaatttaatactgaagaagtaatcaaggcaattaacaatgtagaagacttaattaaaggtatggaggatgataactccaaatcaatacttaatcagaatttagataatataaaaaatgaaattaagcagaagcatccgaagaaagaagtattgactacttgtttaaaaagtatgcattttatcactacttccgtagctttaattcctgatttagctttaggtataaaaatgcttgcatcattgataggcatttcaatttaatattataaaaataagaaagctatataatattagagttatcgttccatctccttacccatgtaaattccatagttctttcgtatttgataaagttcgtccatagtagattttgtagaagaatactcttgaataagggtattctttttttcttgcagtttattaagtttatctaaaatatcctttgaattcggcagctttgaataggatttttttagctttgaaagagctatttcatagtgtgtaatttcagccttatgctcctcaaaaaatgctttatcggaagggtttgctttatattctttgtagtaggctcgatattttttaacagtatgaacctgctccattgtatcggaaagtagctgcatatccttgtcaatttctttcattttatcttgtaagtcttgtctttcttcagcacttttttgaatgtatttatcaagctgcttaatggagttaatgccatgttctctgataaaaataactgactcagccattgtatttaagttatgtttggttgcccaatattcatagcctttgctctctttcactttggcattggcattcatattgatgatatttccgattcgtcttttgacaggtggagttgtaatagattgattttctgtaatacgctcttttaatctttcttctgtatagtcctcaccaatcgttttagctcttgtaaatcttgtcttatcttttggtttaaaggctatgtgtttcccatactttatttcataaccaagctccgccattttttttagaaattcttcccaatacttagactgttttataagacgatcaatgtcaaattgaagtctgcttttccaagaagtacctctcttagattgctcattttcataccatgacttgccatttgttttgtactttctcttatagctttcgtaaaactcatcaatcacagaaaggttgttttctttgcatagcttatcgctttgatacctgattttgtggtagcttttcttgttggattgatagcacttgcctgttaccatattcacattattgaagatgatatggttgtggatatgccctttatctatgtgggtagataagacaaattcgtactcgtcctttaatatctttttacacagttcaagaccgatttgatgtgccattttaggacttgcttctccgggtaaaaaggattgaataaggtgtctggcaagaacagttccgtttgttccaacatcatttcgtgttcttaaaaactgggtatgagcagtttcttgatggcatttatgagtgcttactaagatttgctcatctgttttttttccattaacaatatatgaaatggcaagattaagggttgattttataggatgtatttttgttatagccataagatttaatcacctccagaagttctgttaagaagcagagaatgtatttgccacaactcttttgagaaatattcaatctgctttttcatatcgtttatatcgtccttatagattatgccggtggaatttacacgctttgcaatctgattgatgttgcttgtagcattggacagtaagccctgtaaatctctaaacggttctaaatccacttgatatatttccttttccaaaacgcatttgcggataaagtggctcatatttctgcaccttgcgagctttcgtttctcctcaaaaagagccttttcttcttcagttagtttaatttccagtctttcatttcgtattctatttgccataggtaaatcctcctttgaatgtatttcggggtcttagggtataccctaacaagttaaaaattgataaaaaaagaagcatatcccagagggctgcttcatcaattttttcgtaagtgtccgtacacttactgtgcttgctcatatactaatcgatcatatactaatcgtgtaagaacaactttaagcataatatttatattattataccatagtttggaaaaataaaaaattatatttcatcaacgtttcataaaaggtgtgtagaatattattgaaagtagttataaactgctattgtgtaaaaataaaggaggaataaaggaggaaaaatttatgaaaaaaatagtatcaagaggagcatgcctattacttacgttatgtttgagcttaagtacagttgggtgtaaaaaaagtaatgaaagcaataaaattaaagaaggacaatctataagttctgaagaggcaggtatgtcaactaatgagaaggataaaaatgaaacatttaagccatcagattatactttaaaaacaaaaaaagaatatgtttatgaatatttaggtcttaaatttaaactttcagacaaatttaaaaagtatatggatgataaaaagatagcgatgttagatgatcaaagtcctatagataaagaactaaagtatgctattttgacatttgaaaaaatgacagaagaacaaaagaatgcagttatagaaaagatgggcgatggatataaaaattggcaaaatgagcttgaaagaattgggactattggtatattcgaaaaaaatacatcagaagaaaaaatatctaaaattacaaaatgtgatactcatactaaaataggagtttcaagtgatggaaaatacgattgctatttaagcacaaatagcggagctgaaagtaatcttctggatgaattaaaaagaactgagattcaaattatagataaaaaagaacgtcctaaaaatggttttgtgctatcagaaaaaactgatttagaaaatacagaagcatttaacaaagaatcggttaaagatttacgtaaactatcaacaaaggacataaatggcaaggattttacaagtaaagattttgagaagtatgatcttactatggtaaatgtatttgcaacttggtgtacagcttgtgtaaaggaaattcctgatttggttgaggttcagaatgaaatgaaaagcaagggtgtaaatatcgttggagttgttacagatactgttgatgataacggtgaaaacaaggaagcaattgaaaagtcaaagttaatacatgaaaagacaaaggcttcatatcctttcttaatgccagataagacaaactttaatggtagattgaatggtatacaggctatgccagagactttctttgttgatagtaatggaaatattgtaggtgatacttattctggggcaaagagttcaaaggaatggaagcaggtaattgaaaaagaattggaaaaaataaaaaataaataaaagtaaagcggtgattggtatatggttaataagtttttaaaaagccgtgccttgtctttattaattatctttattagtatggcgatgatttactatggtcatagtaatggagaaactaaagttgtcttggataaggcgataagaatttgtatggagtgtattggaattggatagaattaaaaatattataaatggtagtacaaaaaaagataaatataaaataagagatcgttttaggcatttatttcaatccgtttggtttttaattactaattcttactttgaagggtttaagactggtaaaatctacggtgggaatttaaagaaaatttgtgttccaggtatgaattgttattcatgcccgggagcaaaaggttcttgtccaataggatcactacaggcagtaattggaaattcaaaatataagattagttattatatagttgggattttgttttttataggagcattggtgggaagatttgtttgtggatggctgtgtccatttggattgattcaagatttgctacataagattcccttttttaaaaaagttgaaacatttaagtttgataaacatttgagaaaattgaaatacataatattacttgtatttgtaataatattacctttatttttggttgatattttaggtcagggttctccgtatttttgtaaacttatttgtccgattggtatgctggaaggaggattaccacttgttttattaaataaaagtatgagaaatgcgataggtttcttgtattattggaaaggaatcattctaatagttactttgttactttctataattatatatagacctttttgtaaatatatatgtccacttggagctatttactcaatttttaaccctatttcaatatttagatatagattggataaggataagtgtattaattgtggaaaatgtaaaaaagtttgccaaatgaatatagatccagttgagaattgcaatcatctggagtgtatcagatgtggacgatgtaaaaatgcttgtccagtggatgcaattagttatggagtaagaaaatagagaggagtagttaggaaagtgataaaaaatgctatagcatatattacaagaaagagaaatagaactttaataatttttatcatattaactatagttctttcttgcttgtattcttgtttaacaataatgaaatcaagcaatgaaatagaaaaggctttatatgaaagttctaattcttcaatatcaataacaaaaaaagatggtaaatattttaatgttaatcaatttaaagatattgaaaaattaaaagaaattgaagaaaaaataattcaatatgatggattagcaaaactaaaagatgctaaagtagttagcggagaacaaagaataaatagagaagatttatctgacgaatttaagaatgttgtttcactcgaagctacaaataatactaaaagaaatattttatttagtagtggagtatttacaattaaagaaggcaaaaatataggagaaaatgataagaattcaattattgttcatgaagaatttgctaaacaaaacaatctaaaattaggtgatgaagttgatcttgaattactagatattgaaaaaagtggaaaaataaaaagtcataaatttaaaattatagggatcttttctggtaaaaaacaggaaacatatacaggattatcttctgattttagtgaaaatatggtgtttgtagattattcaacaagccaagagatattaaataaatcagaaaataataaaatcgcaaataaaattttaatgtattctggtagtgcagaatctacagacttagccttaaacaaattgaaagagcttaaaattgatgagtcaaagtattttgttgaaaaagattctaatgcgtttgaagagtctttagagtcagtgagtggaataaaacatataataaaaataatgacttattctattatgttaggtgggatggttgttctttcattaatcttgattctatggttaagagaaagaatttatgaaataggtatatttttatctattggaacatctaagatacaaattataatgcaatttatattcgagttaatattcatatcgataccaagtataatatcttccttatttttaggaaatgtattactaaaagtaattgtagatggattcattaactcagaggactcaatgatttccggtggaagtttaataaataatagtagttttatgttaaatataacaacacttggacaaagttatttaatattaataagtattattgttttatcagttgtatttgcttcttcattaatattaatcaagaagcctaaagaaatattatcaaaaataagttaggagaaaataatggatatattagaaataaagaatgtagcatatagttatgcaaattctaaagaaaaagttttgtcaggagtaaatcaaaaatttgaacttgggaagttttatgcgatagtaggaaagtcaggaacaggaaaatctacacttctttccttacttgctggacttgataaacctcaaacaggaaaaatattgtttaagaatgaagatatacaaaagaaaggatatagtaatcatagaaaaaataatatatctttagtatttcaaaactataatttaatagattatttatcaccaattgaaaatattagattagtaaataaatcagcagatgaaagtatcttgtttgaactaggtttagataaaaaacaaataaaaagaaatgttatgaaattatctggtggacagcaacaaagagtagctattgctagagcattggtatcagatgctccaataatactagctgatgagcctactggtaatctagacagtgttactgctggagaaataattaatatattaaagacattagctaaagatagaaataaatgtgtaatagttgtaacacatagtaaggaagtagcagattctgcggatatcattttagaactaagtggtaaaaagttgaaaaaagtaaataaaatgaatttggaggttgaataatgataaaaaatgcatttgcttatgtaactagaaaaagcttaaaatcattaattattatattagttattttatctatgtcaactttaagtctcattagtttatctattaaagatgctacggacagagcttcaaaagaaacatttgctaatataacaaatagtttttctatggagataaatagacaagtaaatccaggaacacctagaggtgggggaaatgtaaaaggtgaagatattaaaaagatatttcaaacagatagtatagactcctatgtaaaaagaataaacagtgttgcagatttagttgattatgatattattgaaactcaagagactcttgcgaatcaatcacctgaaagagcgaagaattttaaaagaacagttatgttaactggggttaacgactcatcaaaagaaacaaaatttgtatcagaagcatataaattagtagaaggaaagcatttagaaaatgaagataaaaataaaatcttaatgcataaagatttagctgaaaaaaataatcttaaagttggagataagataaaaataaaatctaatttatttgatgctgataatgagaaaggtgcagatgaaacagtagaagtagaaattaaaggtctattcgatgggcataatagcggtggagtaagtgcagcacaagaactatacgaaaatacattaatcactgatgttcatacagctgctaaagtttatggtaatacagaagatacagctgtataccaagatgcaacattctttgtaaaaggtgataagaatcttgatagtgtaataaaagatcttgggaaattagatataaattggagagaatataatttgattaaaagttcatcaaattaccctgcattacaacaatctatatcaggtatctactcaatttcaaataaattatttgttggctcattaatatttgcaggagttgtagtttcattattattattcttatggatgaatgctagaaagaaagaaatagcagtattactatcattaggtatatcaaaattagaaatttttggtcaattcctaattgagatggtatttatatcaatccccgcattcgttggttcttatttcttagctcaatatacagctgataagcttgggaataatatattgaataaggttactggtgatatagctaaacaaatagctagacaatctgcatctagccaattaggtggtggggcagaagctgaaggatttaacaagacattatcaagtttagatataaatgtattacctaaattcataatttatgtagttatatttatgagtttagtacttcttgtatcattgattatttcttcattcaatatattaagaaggaatccaaaagaattattaattgacaataattaaaattttcggtgctttttagcaccaaaaattttttggcttttaaatatcaaataatatgctgtataatataagtgtagaggcttaagtggaggtatatatgaaaatattaactgttgaagatgataatatgataagagagggaataagtgaatatctttcagaatttggatatactgttattcaagctaaagatggaagagaagccttgtcaaaatttaatagcgatataaatttggttatcttagacattcagataccttttataaatggtttagaagtgttgaaagaaattagaaagaaaagcaatttaccaattctaatcttgactgcatttagtgatgaagaatataaaattgatgcatttactaatttagtagacggatatgtagaaaagccattttcattgccggtcttaaaggctagaatagattctttaattaagaagaattatggacatttagagaagtttgaatataatgatctatcggttaattttaatagctatacagctaaaataaatggtgaagaaatagatgtaaatgcaaaagaactagaagtattaaaatgtttattggataataatggacaagtgttaacaagaatgcaaattattgattatgtatggaaagatagcgaagaaactccttatgatcgagtaatagatgtatatataaaagaacttagaaaaaaattacaattagactgtataactactataagaaatgtaggatataaattggagagaaaatgaaaaaattaaagatatttccaaaaatgttcatacaaatattttctgttcttggaataataattatattagttcattcattagttttttttatctttcctaaaacatatttggagacgagaaaagaaaagattcataatatggcaaatgaaatttctagtaatatgaatggaaaagaaataaaatatatagaacaaactttggagctttattctaagagtagtgaaataaaagcatttataaaagaaaaaaataataagaatgaaatacaaatcaaagataatataaatgttaatttagaaagtgatagtaattctttgataattgaagaaagagaaataaagcttaatgatggtaaaaaaacaaatctacaatttgtttctacagctgatatgcaaaaagatgcgaaagatttaagccttaaatttttaccatattctttattaatatcaattttattttctgctattatttctttaatttatgcaaaatcaataaaaaataatatacaagaaataaaaattgttactgataaaatgatgaaacttgataaaaaaacgcgtttaaaagttagctctaatgatgaagttggagaattaaaacaacaaattaatgatttgtattctactttattaagaacaattgacgatttggaatttaaaaataaagaaattttaaaattagaaaagttaaaatatgacttttttaaaggtgcatcccatgaacttaaaactcctcttgctagtcttaaaataatactggaaaacatgaaatacaatattggaaaatataaagaaagagatatttatattaatgaatgtattgaaatcgttgatagtttaacaaaaaatatttctcaaatattatcagttcattctatagaaaatttgaataatgatgaagaatatttgaaaataaatgatacattagaagacatattaaaaaagtatgaaatattagcaaatcaaaagaaaataactgtcaataattatatattagatgagaatgtttatataggaaaaacagctttaaagattattctatctaatttgattagtaatgcggtaaaatatactgatgtaaatggggtaattaatattgggatagttaatgattggttatatatagagaattcatacggtaacaataaaatttcgaatatggataaaatatttgatgttaaatttgatttaaataaggaaaatagtaatggattaggtttatatattgtaagtaatattctgaataattacaatatagaatataaagcattgcaggatgaagaattttttatctttaaaattaaaatattttcttaaacaagatataattttgcaatagttattgaaaaatagagacttattattagccatggaagtaaaggcttttttcttattgaaagtgaacagaaaataattgatacaagaaatcaggatttgaacacgctaatgaaaatattgttagtaaaactatatgagttagtcttttcggatgcagagactgtttaaatatttgatagaatagaaacttaaaaagtttaataaaactcaattatataagtagtagatgaatatgatggttatttagattattgataaaatggaggaaataaatatggaagcatctaaacgtttaatgttagaaatatttagaattcaatacattcctcttttttataatatgtatagtagatgattgtttcaggtgcgaattgaaacaatcaagttcatataaagaaatatttttattctttcatttcagaggacttcttatgccaagatgcagaagtcctccttttttatctgaaaaacaagcagataaaaaagagatggaggaaactttatggcaaaagagtattatctttatatcagaggacaaaaggtaaaagtcagtgaagatatatatatagtctactggcgagaaaaagaacacgagaagtatttagagcaggtggacaggaaaaaccacttgctctttttttcagcattggatcatgacggacactttacagataatattgttgatgaaagtgttgatgtagaaaagattgttgaaacacagatgatgattgaagcagtaagaagtgctataacaaggctcaatgcagaagaaagagatattattgaacgcttgtatttcaatgatgaaactgttcgttcagtagcaaagctcaaaagtattacacatccggctttaatcaaaagaagaaacaaaattcttgaaaagctgaaaaaatttatcgaagaactttaaaactttggtaaccaaagggggcaaattttccttatgtaaagtgaaggggagtttgacctcctttactttcttgagtaggagatacgcctgcttatggcaaataggaaaatgtaaagaaaacagtccctttcaaatattgatctttgacaactgaatagaccaaggtaggactttatctacttactgagagttatgacctacgccaagacttttctgctgatgaaaatcggttcaaatgaataccggcataatgccgaggttagaagaaaatgagcgatagataggaatacataaaagataagcgtggcagcttatttcgatgatgtaagtggtgataatgatacttcaatagtttaagctgcctcgtctgaaacaaggggcggaggtgagattcctatgtagcagccaatgcacctaccaatgtcataaaacttagtaagaaaaataatatttggttataaagaatttaaagtggaggaggtgtattagtggataatgactggaatggattggctgatttgatagcaaatctgattacaaaatatgctggagttttagatttagagaatcttccaaatcctactccagtaaaaaatacagaggataagaataaatttgatatagctaaaagcacggattgagaaagagaaataaaagtgctataatatacttgagattaaagtccaaacctttattggtaaaaatatataaatatataataaggatattgaggttaatgctatgtcaaaagaaaaaataaaagtatatctctatacaagagtatctacatccatacagatagatggttattctttagaggcacaaaaatcaagaatgaaggcttttgctctctataatgattatgagattgttggtgaatacgaagatgcaggtaagtctggaaaatctatagaaggtagagttcagtttactcgtatgatggaagatataaaatccggaaaggatggagtgtctttcgttcttgtatttaaactatcgagatttgcaagaaatgctgctgatgtactttcgactttacaaataatgcaggattttggagtaaatcttatttgcgttgaagatggaattgattcatctaaagatgcgggtaaattgatgatttctgttttatcggcagtggctgaaatagaaagagaaaacattcgtgtccaaacaatggaaggtcgcattcaaaaggcaaaagagggtaaatggaatggtggatttgctccgtatggttatcaacttattgatgggaaattgataataaatgaggaagaagcaattgcaataagaactatttttgatcaatatgtaaatacaagtattggagctaatggtctttctaaatatttagaaaatcatggtataaggaaaataccaagacaaaatgggaaaaatccattgtttgacgcaggtcttataagaaaaatattaaagaatcctgtgtataacgggaaaatagcatttggaagaagaactttagaaaaagttcatggtacaaggaatgaatacagacaagtagagcaggacgattatttagtagcagaaggcattcatgaagcaataatcccagatgaattgtggcaggctgcacaagttaaactgaaagcacaagctaaaaagtatgaacatgtaaataagggcaagaacatgaggacacacttattatcaggaatagtaaagtgtccgatatgtggagctggaatgtttgggaataaatctataaaatataaaaaagatgggacgaagtataaagacttctattactatggttgtaagcatagacttatgaatagaggacataaatgtacctataataaacaaattagagaagaattgttagatgatgccgttgctgaggtaataatcaagttagtaagcaaccctaaatttgcatctatgatacaagaaaaaattaacatgaaggttgatacatctgctattgaaaatgagatagataattaccaaaatgaactaagaaaaagtcattctacaaagtataagcttattgaggaaatagataatttagatgtagaggataaacattataagagaagaaaaaatgatttagatgataggctttatcgtatgtacgataaaattgaggaattagaaagtcagttaatagaagctaaagcaaaaaaagaaacgatagaggttgagaaacttactggtgataacatatataaagtattgatttattttgacaagctttataaagtcatgaacgatgttgaacgcaggcagttaatagaagcactcatttcagaaattcaaatttatgaagaaaagcagcctaatggacaatggctaaaatccattacttttaagctacctatcattgatgaagatcttaatataagtttggaaaatgatgagcaagttgatggagtatctgtaccaggagtagaccctaatacaggttttccacttccagatattggaggaggaataggggttgaagtaacttttgatgttgtggttgaaagtattcctaacccaaatcctactaataatatagctactatagattactcctatacacctgtagaaggcggtataccaaatgatttttcagtagattctaatccagttcctgttgaagtaatctcagcagatgttgaagttacaaaattatctgaacctactatagtgaatccaggagaggaattaatatacactataaaagtagtaaataatggaccattcccatctgagaatgtggttttaacagatgatgtaccagcttctattataaatccagagtattcattagatggaggagtaacttttcaaccatggactggaagtttaaatatagggacattagaagtaggagagacaagagttattataattaggggtattgtaaatccatcaacagtaggaattataacaaatacagctgtagtatcttcaactacagcagacccaaaccttaataataatacatctacaatagagacagaagtgaatttattagcagatattttagtaatgaaaacagcagaacctaattcagctgttccaggtactttattgagatatactattcaagtagaaaacttaggaccagcaaatgctgaaaatgtaatattaaatgatgatattccagcctctattataaatccagaatattcattggatggaggagcaagttttcaaccatggaatggaagtcttaatataggaactttaaactctggaatttcattaacagttttaattcaaggaacagttagtttaaattcttcagaatatatagtaaatacagcaacagtttcttcaactacacctgacccagatttaagcaacaatatatctaccattattacaccagttaacccacaagcaggtatttctattataaaagtagctgacgaggatgtagctgttccaggagaagaatttgtatatacaattgaaatttttaatgaaggaccatctaatgctacgaatgtagttttaacagatgatataccagatgttattttaaatccagaatattcattggatggaggagcaactttccaaccatggaatggaagtcttaatataggtacagttgcaccagggcaattaataagaattatcataaagggattagtaagttcaactgctacaggagatattactaatacagcagaagtaagtgcagatgtaccagaaccagttacggattcatcaacagtgacaactcctatagttccatcagcagatatagaagtaataaaaactagcaatatggatacagcagttccaggagaaacttttagttatactataacagttataaatttaggaccatctgctgcacaaagtatcgttttgacagatgatataccagatgttattttaaatccagagtattcattggatggaggagtaactttccaaccatggaatggaaatcttagtataggcactttggatgctggagaaataagaagtattataataagaggaacagtgagccagacagcagtaggtacaattataaatacagcaacaataagttcacctacacctgacccaaatccagataataatacttcaacagatgaaacagatataagtccattagcagatatttctgtgataaaaggcaacgaaccagttgctataccagggggaagatttatttatggaattgaaattgcaaatgcaggaccatcttttgcagagaacgtaactttaacagataatataccagcttctattttaaatccagagtactcaatagataatggagtgactttccaaccatggaatggaagccttaatataggtactttagatgctggagagataagaaatatcataataaggggaacagtaagtcaaacagcaataggtacaattataaatacagcaacagtaagttcaactacacctgacccaaatctaaataacaatacttcaacatcagaagcagaggtaagttcatcagcagatatttctgtagtaaaacgaagcaatcagactgttgtcgtaccaggcgatgtactagactatacaattgaggtgataaatgcaggaccgtctactgctcagaacgtaactttaacagataatataccagcttctattttaagtccagaatattcaatagataatggagtgacttttcaaccatggaatggaagtcttagtataggcactttagatgctggagagataagaaatattataataaggggaatagtaagtcaaacagcaataggtacaattataaatacagcaacagtaagttcaactacacctgacccaaatctaaataacaatacttcaacatcagaagcagaggtaagttcatcagcagatatttctgtagtaaaacgaagcaatcagactgttgtcgtaccaggcgatgtactagactatacaattgaggtgataaatgcaggaccgtctactgctcagaacgtaactttaacagataatataccagcttctattttaagtccagaatattcaatagataatggagtgacttttcaaccatggaatggaagtcttagtataggcactttagatgctggagagataagaaatattataataaggggaatagtaagtcaaacagcaataggtacaattataaatacagcaacagtaagttcaactacacctgacccaaatctaaataacaatacttcaacatcagaaatagatataagttcatcagcagatatttctgtaataaaattagcaaataaaacagaagcatgtgtagaagagcaaatagattttgtaatagtagtatcaaatgcaggaccagaaaatgctcaaaatgttactttaatagacaatgtttcagataagcttaagaaagcagtattttcacttgatagaggtgtaagtttccaaccatggactggaagtcttaatataggtacactaccagctggaactttaagagttattctattaagaggaattataaaatcaacatgtcttgatagattaacaaatattgcagaagttacttcaacaacaccagattcaaaccttaacaataatatatcaagagtgcaagtagaaataaaacaatgttgttgtaatgattgctgttgtaacaactgtagtaattgttgttgcaatgattgtggttgtaaagattgttgctgtaattgttgtaaaaatgacttttggtgttgattttataaaataattttgtataccttaaattaaactgaaataaaaaataaattcacatatgagtaaaatattttataaatattaataaattttctatctttgatatggaccacattcgtaatactagttattaaatgaagtggtcctttttaattcattaaaattatttattctaattaaattttaaatgtattaaataattttaattttttataaaaaatattcatatattctttatattaaagtttagatatctaaaaatacttttagaatttattatattatgttaatttttttatatcttataatgattatatttttctaactataaaaatagtatttacttatatttaaaaataaaagaattttattcctattgtgtaaagtgagaatactattttcttatattggtataataatagtaaatctataatatagaaaagaggtatttctagtatgcatgaaaataaaaagaatctattagacggaagcttagctcaatataatgatacagcagttccaaaaataccagtatttgctggtaacgatataacttcagaagtttattattttaaacctaatcaagttcttaatgctcatagacaccctaatggtgaacaaatatttgtgttcctaaaaggagaaggtaaaatgaaacttggtgagcatgaatgtgatgtaaaaaacggcgatactgtatttgtaccaacaggagagtggcatgaaattactaatggaagcaatgaagaaatggtagccgttcaaattacaaaaattaatgctggagcagaatacagaggatagatatataagtacagttagtactttaatatctattttattatataaactttaatctcaaatataaaaagagtcttttaaaaggctctttttatatttttgttaattttcattataaaaacaagaaaatatctagctaaaactaatatattttatttaatattttttatagcattgtttgcaaactcagtatttacgatatctttataaggtgcttccttatctagttctttagcttctttcataacagtcatcaatttcttcaaaccttcctcctttaatacaggattttgagaccatgcatctattgatttatatctatctacaactgttgttaaatcttctaaagatatatcttcaaagaaaggttgcatagccttagctacttctttgctagatgcttgttgaacccataattgacctttataaacagcatttgtaaatctttgaattaaatctttattgtttttcatgtatgatctcgtagtagagtatgctgtaaaaggtatttctccagaatcttttcctatagatgtaactatatatccactaccttctttttccattgctgttgctgtaggttcaaatgctgttgtaaagtcaccctctccacctgcaaaagctccagccattacaccaaattgtacatcagttcttacattaacattgcctgcttttagattttctccaatagtaagacctttttcttttagaacatattcaaaagtcattagtggaactccaccttttctaccacctaatatttctgttccttttaaatcattgtaagagaaattaggcatttttttcctagcaactagaaaactaccatctctttttgtcaattgagcaaagttcactgcataatcgtttttgttttgattatatacatatatagatgcttcaggacccattaaacctacgtttgcttcacctgaaatcaaagctgccatagttttatctgcaccttgggtatttataaggtcaatctttataccttcatcttcaaagaatcctttcgtaatagcagcatactgtggagcataaaaaacagagtgagtaacttctgctatagttactttatccagatttttagacgaagaagattcatcttttttgtcattagagttaaaatcacatccagttagacatattgtacttacaatgatagagcttgctattgcgactatttttttaaacataataaatacctcccataagacatacgaatagtatatagtattaaaaatttattgtagttgttacaaaaatgtatctatgcttataatatttctacaaaaacttaataataattttcagttttatgtttagtttttttagtaatatgtaatattggataaattatattgattatttataaactaagtaataaaattaaaataatatcacttttttgtctattatatataaggaaaaattttttaataatataaatcatattcatttatattattaaaaaatttgtttatagaaacttttattattttatataaaaatgataaaaacttatattttgtatttaatagagtgttgctaagtgaatatatttaaaatggaggaaactttatgaaacaaaataaatatgatgatgatagattttttaataaatacagtaaaatggaacgttctacaaatggattagcaggtgctggagaatggcatgttttaaaaaaaatgttacctgatttcaaaggaaaaagagttttagatttaggatgtggatttggatggcattgtcaatatgcagttgagaatggagcaatttctgctgttggagttgatatttcagaaaaaatgttaaaagaagctagaaacaaaacgcaacttgataatataaattacatatgtatgcctattgaagatattaattttccaaaagatagttttgatgtagttattagttccttggcatttcattatattcaatcatttgaagatatatgtaagaatataagtaattgtctttcaaataaaggtaattttgtattttctgttgaacatcctatatttactgcatatggaagtcaagagtggtactgtgataaagatggcaataatctacactggccagtagatagatattttgaagaaggagtacgtaagtcaaattttctaggagaagaggttataaaatatcataaaacattaacaacttatttaaatacgttaatgaaaacaggatttgaaatattagaaattattgaacctcaaccagaagaaaaactgttagatacaattcctgatatgaaagatgagctacgtagacctatgatgttacttgtatctgcaaaaaaaagataagtaaatataaataatcattattgtagaaaaaaattgtagaaaataattacactaatggagatgattataccagtggtattaattacaccagtagtaaggaggcaaaagcattcgttgcttttgccattttttaagttgcaattatacttctacgtagtatatttcgtttccattttcttctataagctttttcatatcttcaaattttaaaaatacagtagcagtattatcatttggatgtatacctattttatccatttttaataaatccttatcaaatacaacttttacaacagcctctttatcatttaatataccaaaaggagtcacagctcctttagtaagtttcaagtatttttgaagtctttcttctgatgcaaaactaagaggtttactatcaatttgttgacgaatatcttttaaatctgcttttttgtctttacctaatacaactaaaaaatgttcttttcctttagcatcacgaagaaataggttttttacaacaaattccatatgtaatgtttttaattcttccatttcttcaattgtataaactggtggatgatttacagcctcataaggtatgcttaactcatctaattttttatatacttcctgttgttgattgttcatgatttcctcccattagaaatttattttatatataaataatattatcacagaaaactttaaaagaaaacgttttatataatatagacaatagattatatttttataaagaagcaagaatactcaataaaacttaaagaaattaaacaatttctaaaaataccttgaaaatagaaccttatttgccatttataaattatataaaaagggattatataaagtcatatatgaaaaaactatattatactatcttttctttttggaataaactatactttaaatatagatatttaatttaaataaattttacagtattaatagtaaattatcttagaaaggaatgtgctttatatgtctacagacaaagttgttggaatcatagatgaagaaacggcagaacttgcaggaattgaatatactggtaaaatttatgcttcttctggtgttataaaacatataaagaaaaaacatagatgtcaactgagtaaggatatttttaatgatataatagacactataaaagtggtattaaagtcacctgaatatataggaagtcatcctaaaaaacctggaaaaagtgtggagtttataaaaaaaattgataattatattttagtagctacagaattagatacaaaaaaaggatatttatatgtatcttcaatgtatgctataaaagaagcaaaattagaaagtagagtaaacaatggaagagtaaaacaatatgatggttaacataatattattaattttccccaaaatattgaaaaatattattatataagttataatattaatatacacgtagatatttattagttagatttgaggttggaaaaggcacccaatacgctactatagagtagttaatagagatgcaggatacgccgccctgccaaatctaattaaattaaaaagagaggattaattcctctctttttgtttttttgagatactaatttaatctatatagaaagattgaaggtcatttatactaaaagttttcagttatatacattaaactaattaaataagatatttataatctatatatgatacatattatatattaataaaagaaaaatatatagaaaatccttataaaaatttaaattgtaatgaatagtaagtaattaaaaagaatttttattgatttttaaaaatttagttagaaactatatcattatggtaaagaatgtattataatgtttagaaatattataataaggagcgattaaacatgaatctatcgaagaaaatagaagataaaagaaaagctaaacagagagctgaaaaagttaagaaagctaaaattgctacagctggtgtggtattaggagctgttactggtgcagtgagtggagtacttttggctcctaaatctggaaaagaaacaagagaggatataaaagatgcttcacaacaaattgctgaaaagataaatatgaaaactgtagatgtaaaaggcaaagtatctgagaagctagaggataaaaaaggaaactttatagaatcaaagaaaaaaataaaaaaatatatagataacaaaaagagtgttgaaaattctagtgaggaagataaaataatagatatagttgaaccagttagtgttactgaggaataatatggacaatacaataacgattaacataagtataatatatgtattattagctatacttgcttgtattgctttagtttatttaattattgtacttgttaaactacataagattttaaataatgttggaactatgttaaatgaaaatactcaaaatataaatacaactttaaataatcttcctaatgttgtagaaacttttggagaagtaggagaaaatatgaaagatgtaacagaagtagttactgaagttacagcagattttcttgttactaaagacagtgtcaaatcaaatatggatgttatagtcgatatattgactataattaaaaatatttttctagataaaaagtaataaatttaatataaaataagatataatttaaacgaccttaaaataacatttataaggtcgttttttattagcttgatttgacactatgtgtttttaataattggtaatattcctctttatcatttgaacatatatatctatgcttgttgtttcaattacatccataagaacatctttacattcaagctcaaaatcttccattccttctaaatattcatcatcttcatcaaaaaagatataagaattatatagccattcttcaaatttttcttcaagtatatcccaatacgaactccaaaataatccacaacctgatatataagatgctctactttgatttatataaacctcatttagaagcttttgtaatctactgctataaagaaaatctgctcttccactgcttgatattaattcatttaaatcttctattgacattaattcaactttaccacttttatcataaggagtataattttcatcaacccatttatgtggtttgttttctctgcatactgttgctatcaactctacaacttttgttcttatcatttttttatcctaacttatttattttttataaaataatcatgattttataatttatctatttcttgtaatgctaatttaacagtttcatatctatcagcaccatttattactacatcaccttttacaagtttattagcttctccacctacaacataaacctttttacctaaaccttgcttataactagacgcctcaattattaaagaatctttcaattgccaatgtaaaatctgagcagccactttatcagcatcacctgtataaacgattacattttcatacactttattttcccctcccccttgagaatttgatatagatttgtttagtataccttctgctatcaatttagcaactttatctttattattaacataataatctgtatctgctttactatctacaaaacatacttctattaatattgctggtgcaatagtatgattaagccaataaagacctctaacatcagactttgcacccctatctttgaatactgtagctaacctagtattcactctttctgcataggttttgccattattagtcttatatattgtttctgtccctactggagttgaagttgtagcatttgaattaaaatgaatctgaacagccaaatcagtttcctgtttatttgctatagcacattggtctgctaaatgattacttgattcatcaactcttcctgtataaacagtagctccacctattttaagccatttaacaattaagtcattcagtattcttgtttctttgctttcgtttatatacccaacagctcctgtaccttttccaattaaagtgtgccctggtattattactactttcaaactaacatctcctttacaattaaatttaacttctatttaatatatgcataacctagaattttgtttctttttatatcttatacttttattataacccattttgtaaaaatatagaatattaagtaaataatgttaaaattataattttgtatataagacattacttgattgcaataattttatagcatattcatctattctatatccagttctataatatatatgtttaattccagcttgaattatagccttagtacaatttaagcaaggaaagtgagttacataaatagagcaatctttaactgaaataccttcttttgcacaataataaagggcattttgttcagcgtgaatggttctaatacaatgtccatctctcatttcatgaccaacttcactacaatgcttatctccagaaatactaccattatatccagtagacactattctgttttctgaattgacaattatagctcctacataagctctatcacaagttcctctttcagctactgtttcgcacagtctcataaaatattcttgccatgagcatctattttcaagttttttattcaaatcatatacctccaaaatttatatctaatatataagatttataccttaaaaataatattaaaaacaaatttatacgataaataaaatttattaatactgtttttagtctaaattatttcattttaaattaaagttacaaggaatctaaaattatatatatctttcttcgtaatatgaatgttacaatataaaaaactgtctcaataaaatagagacagttttacagtcaaagtttataatacaagttcatatttttctttaaattcttttacagcttcgggccatgccttttgttctgtaatacctttttctttagctattttaattgcaatctctcttatcattgcagcgccttctaatattcccatttttaatctcccttcaaatatctttttgtatagaatataaatagtgctaagatttattacatgctgcatatacaatatctatacaacacataacttgtaaattccttttattttcatacgtctttaaccgacatataattatattcaataagttttaaaattatgaactcaattataattatttttatttttttagaatctaaacactaaaaattgtaggtaaatttgtcttatgcctttataaatatttctacagttttaattactggacatatctatttttattataaaaagcgcttaaaaatcgagaatatccgcgtaaaagctgtatataagcaaaacgattaaaggaaaaagaagaaatttacttgaatgttaaaatgcgttgcttgaagcaacgggcagttttgcctataatatcggtaacaactgaaagaaaggtggttagccctaatgttaagcgaaaacattaaaacaatcaggaagtcaaaaggactttcacaacaagaacttgctatcaaactgaatgtagtgcgacaaacaatatctaaatgggaacaaggactgtcggttcccgattctgatatgttgatttccatatcagaggtgcttgaaacgcctgtaagcactttacttggagaaactattgttgagtcggaagttgatagcttaaaagtgatttctgaaaaattagagattataaacttgcaacttgcacaaagaaaaaacatgagaagaaaaatgtttcattggttatttattttattatgtgcagtcatagtaatagtttttgtggtcttagggggactaaatagtccttacttggattggaattataccgaccctgaaaccgctgtttttggagtagcttttcatgcttttgagtggctatttgtcagattagtaccgattgtccttataggagcaattattggaatctttttgacacgtaagaaaatatgaagtaactctgctttttataatatagcaagcgttccttaaaagtgtcattctacatggcaatcgaggacaactatgtaaggaagaacctttttgatttccaactaagcgaagttattgaggacgccagtaggcccaaaaccgcattaagtaaagtacaggaagcaagactgctggacttatactctcatgcgtcagatgcagaaaatgcgaggtctgtagcatgatttacaacgatttgtacaacgactacgagtagaaatatatggagataagtattatctacgaaatcagaaaagaaatgacttgataatttactcatgttataattattgatgtgaaattaataaatcgaaattccttttttagatttaacaatactgagtaaggaaaaagtgaatgacttttgcaaggaggtgttaatatcaggcaaataaagtcttttgtttttccagttatatccttaatattcttagatcaaattagcaaagttcttataggattattcttaatggactttgaaattgatataattgggaaatttttaagattcaatcctgttcaaaatacaaaattaagtctctgctatctaacaaacggagcacaaaaatgaaaattaaatattaaatataaagcacagttaattttgattaaaaagttgactgtcttttcttttttataaatttaagcatgggtaataaagaaatgactgcatttaagcattatgtatataattggaggcaataaaaagccagcaaagcccataaaatagagctgtgctagcaacatgatgagttataagaagataatcaaaagcttacgctttattttaatttaaaaaaatgattactgtaaagaaatcattttttattataatcactgatacatcaaatattctaaataaaatttttatttatctggaattgtatattttttctataatattaactacagcgtacattgcccaagcacaaatagccaatacaaatactcccatcattactaaatctaatttaaatacttgagaaccatatactatcaagtagcctattccatatcttgaaactaaaaattctccaactattacacctacccatgccataccaatattaattttagttaaatttattaaatttcctgtgtttgcaggtaatatgagtttaaataatatttgagatttagtagctccaaagctttttaacatcttaattttttcttcatctatattcataaaataattataagctgaaagtatagtaacaacaacagaaatcgttacagctgttacgacgattccttctattccagcacctacccaaactataattataggagctaaagcagtcttaggaagagcatttaaaactaccaaaaatgggtctaatatttttgataatttttctgaccaccaaagagcaattgctaccaaaatacctaatacagtacctataacaagaccaagaacagtttcatatacagatattccaatatgtttaaataattgaccactaaatgcatattgaataaataaattgtaaatatcacttggtttgctaaatagaaatgtatttataacatttaagtcagctaaaagttcccagattacaataaaaccaattaaaattaatagctggtagaataatacatttcttttttctctttttacacctttaacatagtttatatatccttcagatcttttattaagcctcatgtgtatctagctccttccataatatgtcgaaatacttttgaaaatcaggaactttacgtgttttgagaggcgtttttgttccatccatgttaagttcaatatcgtaaatattttttatggtagctggtcttttagatagtattgcaaccttatctgatatgcttattgcttctgctatagctaaaaaagtgcaactaattgcttaaagaaacagaattatccacttcagcacccatataaacaatattaagatttcctaaactgctatcccaaatgatactattaataatagtagataataacaatctcttatcatctaaactggcattatcaacttcatcattaaatctcttcaaattactaacaataatatcaatattaatactgtcactactaatattgatattactagattccaaaatattaatcttatcctttaaaatactaatctcattatttaggctctcaatctgggaaactatataatcagaagcagtactaccagtattttttgcaagctctataactaaatttttaataagtctttccttatctaaaatttgatttttaagtaaattagtctcagatttaaaaatattaaaaacattatcagtcttaatgttattactattgaatgcacttataatagactcttctttacaattcttaattttatctataactaaactttcaactaatggaccattaagatttttacagttgcaactatcagacccaagtgtttttttagtaccacaaatataataatactttaaatccttgtcagtttttttgcctttataggtaattctcatattagaaccacatttaccacattttataagaccagataaaagagcagtttttccagttgatatccttggagttttatcacgatttttatctaattgattttgtacttcaagccatatttcaggttctatgactccatggtgttttgcaattgctgctattgagttagatgtatttttagcataggtaaggattccacattttctatctggagtacctacaacatccataccactatttttaaggtaatctaaaatttcatcattagcttttacatatgctggatttctaagtattctagataaagaactagggtcaaatttaccaccacgaggaccccttattccattattatagacatatttatataacttagataaggacctaagttctaaatatttattgtatattagctttacaatctccatttgttcatcatttacttgaagcttatacatacttctttcttttagattttcatctaagaatgtgattttttcactgttgaatccatgaggtgtattgcctccaagccatctaccactacgggctaattcatacatgttgtcttttatacgttctgctattgtttctctttctaattgagcaaatacacttgatataaacatcatagctcttcccattggagttgaagtatcaaattgttctttgatagatataaatgatatgtttagttcatttaatttttctattaaagtagagaagtcagatacatttctcgatatcctatctaatctataacaaactaggtaactaaatttcttatctttagcatcctgcatcattttcttaaattgtggtctatctatattgctaccactaaatccctcatcttcatatatcaaaaaatcttttacaccaatagactttgcataatcaatacataattgtatttgattttctatagaatcaccttttccagtaaatcttgattttcttgaataaattgcagctttcaaaattaaaacctcctataaattaggatatatatttgaaattatttatatacaaccttttaagtaaacttattagaataaatttattaattaggtaaatttatataattctactttttataatatatgactatttattttatttctttactattcaagttctaaatcaataataaattttgatatttaattgtatcaggacaaatctctaatttcatatattattaatataaaatcataggttagtgtgaaaaagttgaaatttaaatattttaaaagataattttttggaactaataggtataacaaaaatttatagggggattgcatatggaaatcaatgttatagaaattttccctaaagataaagctaaacttaataaaatagaaatggataaagctagttggtttgtaaatataataagtaaaaaatatcctaaagaagctttaaatgaagcatttagtattttagaaaaagaattaaatataagtaaagctaatacataagctttgattattgattttatatactattggttttatacgctatgacttgacattatattaatcaaatagtatatttttaaatatagcacaatgaagtgttaaaagagcaatggagctccatagataaagtctatggagcttttttgcgtatttaacttaaggaggatagagctttgaataactttgagattaaaactagaataaaatttggagaaggttcactaaaagttttgcaagaattaaaaaacaaaaatgtattaataataacagacccttttatggtgaaatcaaaaacaatagataaaataacatctaatttaataaactcaacatatcaagtttttgaagaaatagtaccagacccaccaatagaagtagtagtagcaggaatagaagcatttaaatctataaatccagacgtaataatagcattaggtggtggttctgcaatagatgcagcaaaatctataatggacttttctaaaaaaatattaaaaattaacgaagtagagtttatagcaataccaacaacaagtggaacaggttcagaagtaacatcatttgctgtaataacagatagtcaaaaaaaatgtaagtatccattagtgagtgatgatttacttccagatatggcaatactagacccagagcttgtaaaaactgtaccaaattttataacagcagatacagggatggatgtattgacacatgctatagaagcttacgtatctacaaattctaatgacttttcagatgcactagctgaaaaatctataaagttagtatttaaatacttaataaaagcatataaagatggaaatgacatagaagctcgagaaaaaatgcacaatgcatcttgtttagcaggtatggcatttaaccaagcatcacttggcataaatcattctattgcacatgtattaggtggaaaattccatataccacatggaagaacaaattctatattacttcctcatgtaatagaatataattcatcaatagtaggatatactaacacaacttactctgatacagctaaaaaatatgcacaaatagcagaattagtaggacttgggagtgctaatataagaatatctgttagaaatttagtaaatgaaataaagaaactacaaaaagaaatgaatatgccaactaaattgacacaatgcaaattaagtttagaagatataactaatgaagaaagagaaatagcaaaacttgctataaaagatacttgtacattaactaatcctaaggtaccaactgaagatgatataataaacatattaaataacattaaataactacattttattacatgtaaatataatattatacaaatagggaaaatgtttttaaaaatataaattatatattgacaaatataaaacataaaactataatgaaagtatcacaaaggcgtgatactttagtagaaagcaatggagcttcttaggaatattaatattattcttatggagctccttttattttaagcaaatagctttttaataaactatattcaaagaaagcagggaataaatttgactgaagaatctaagcaaagagttattcaagaatatgttcctggaaaacaggttacattagcacatatcatagctaaccctaatgaagacatatataagaagttaggattagtacttgataaaagagatgcaataggaatacttacaataacaccaagtgaagcgtcaataatagcagcagatgttgctacaaaggcttcaaatgtatctttaggttttatagatagatttagtggttcagtagtaatatcaggtgatgtaagttctgtagaatcagcgttaaatgatgttttagaagtcttaggaaatatgttaaacttctcatctacaaaaatcacaaggacataataatacaatgaagaatataatatttatgggaaagacaggtagtggtaaaactaccttatgtcaaaaactagaccagttagaattaaagtataaaaaaactcaatcagtggaactttataataatgcaatagatactcctggtgagtatatggaaaatagaaacctatataatgccttaataacaacatcagcagatgctaaaattatagcaatagtgtatgatgccacacaagaagaaaattatatagcaccaggttttgccagtatgttttgcaaagacgtaataggaattataactaaaataaataaagctactgaaaacgaagtcaatatagcttatgaaagactatcactagcaggagcaagtcaaatctttaaaatagacacagttgatgatattggacttgaaaaattatttaaatatctagaaaaatctaaaaatatagatgaagtttaaggggaaatatttttttattcaaaaatattattaaagtatgataaaataaaaaaatgtataaactattttaagaagatttaatctttaagcgaggtaggaacatggggaaaaaaatactattggttgatgatgaaccactgttaaggatggatacaaaagatatattagaaagtcatggctatgaaataataggcgaagcaagtgatggatttgaagctgttgaaatgtgtaaaaaacacaaacctgatttagttataatggatatagagatgccaatacttgatggtataaaggcaggcaaaataatatgtaaagaaaatctagctggtggagtacttttattaacttcatttgaagataaagaatacgtagaaaaggctaaaagtataggtgcttatggatatttagtaaaaacagcaagtgaaaaatcacttatcccaaccatagaaatgtgtttaaataaggtaaatgaatttgaaaaaatgaaaaaagatttagaaaaagtaaattctaaattgaatgaaagaaaattagtagaaagagcaaaaggtatacttataagagagtttaagatttctgaggatgaagcatacactagaataagaaaattaagtatggataaaagaactacaatgatggaaattgccaaaatgattataataggatacgatgactaatacgataaaaaaaatatcaactgcacaaacatacttaaataataacgaaattgaaaaaattatagaagtatcaaaatccttagatttaatggcttctttttatgaggctgatgtttttatagatgtactaagtaaatttgatgatgaagcaattgttgtggcacatggtagacctaaagaaaagtcaatgtactgtgaaaatgttataggtaaaaaggctttaattgaaaatgaaccaggagttataaagtgcttaaaaacaggagaaagagtaagagatattaaagctttaacacaggaatataaactggtcaaacaaaatattcagccaataacactagatgacaaagttttagcagtactaatagttgaaaaagatataagtagtgaagttaagaatgagtttaatgctagtgaagacgaagaaaataaaaatttacatcagtttataaaacttatcggaaataatgactttttagttgataatttaaattcagccatattaatatttgataaaaatggaaaattaaaaattaaaaatcgtattgcaactgagatatacaaaaatcttgggtttggatatgatatacaagatatgcattacaatgatttagatatagaaaccaacacctttgaaaatatattaatggatgaaaattatgatgagacaaatgaagtttcaataggtaatatgttttttaaaataaagaccatatacatcaaagatgatgaatttaaggtttgcaaaatagtacaagatataagtgatttaaagagaaaagaagaagaattagttttaaaaacagtggctataagagaagctcatcatagagtaaaaaataatcttcatacagtaatatctataataaaaaaacaaagtagattatctcaaaatgatgaagtaaagcagtgtttagataacataataaacagagtatttgcaatactttcaactcattatttactatctaaagaagttgataataatatatctatacgagaaggtatcaatttattagtgtcaaatattcaaggtggctatttatttagtaaggatatagatatacgtataactggtgaagattttaaaattagtggagaaaaagcaacagcaatacttttggttataaatgaaatactacaaaattgttatgaccatgcattttcggatagagaacatggtactatacaaatattaataaataaagataacgactatagaaatattgctattatagatgatggaattggatttgatagtaataatataaataaaaatagcttagggacatatataatagatagttatataacacagatgttaaaaggaaatatagagagaaaaagtaatgagaatggtacagaagtattaattactatacctacacaaattaatatttaaataataactcatctacaaagtagtagttttaattgagcaaagaggcttaaggttattaatagattaagttaattgaatgtatttataaaaattataagtatatattcaatttaacaggtatttattataactttaagcctctttgcttgtttaagacatacttaaattttaggaggtgagaaaatgagagaagagttattaagtgttggtattgacattggaacaagtactactcagttaattttttctaaattaatagtagaaaatactgaatcaaatttttcggtacctagaataagtatagtagacaaagaaattatttataaaagcaaagtttatttcacccctcttatttcaaataatgaaataaatggtcaacaaataaaagatatagttgaaaatgaatataaaaaagcaaatatatctaaagaggatatacatacaggagcagtaataataactggtgaaacagctagaaaagaaaatgcaaatgatgtacttcatactttgagtggatttgctggggacttcgttgttgcaacagcaggacctgatttagaaagtataatatcaggaaaaggagctggagctcatatttattcaaaagaacattcaactacaattgtaaatatagacataggtgggggaactagtaacatagcctcatttaaaaggggagaagtaaccgatactgggtgtttggatataggtggaagacttgtgaagatagataaaataagtaaaaaaataacttatatatcacctaaaatagataaaatcataaaagataataatttaaatcttcaagtaggcacaatggctactgtagaaaatacaaagccaatagtggatataatggttgacttattaatggaaagcataggattaaagaaacagacacctttgtttgattttataataaccaataaatcaataagtatagatgaaaatattaaaaatgtttcattctctggtggagtagctgattatatttactatgatggagaaataaaagattattttgaatatggtgacttgggaattttacttgggcaaacaataaaaaattgtgaataccttaaaaaagtaaatgtagttaaatctatggaaacaataagagccacagtggttggggcaggttctcatactactgaagtaagtggaagtacaataacttacactagcgaaaagtttccacttaagaacttgccagttttaaaattatcagttgatgaagaaacaggtacttcaaaacaaatcagtgaagctataaaaaataaacttaattggtttaaactagaaaatgatttgcagaaagttgctatagccatgataggaaagaaaaatccaacctttttagatatacaagagtatgctaaagggtttgtagatggaatgcaacaaatcatagaaaatgatttaccttttatagtaattgttgaaaatgatatggcaaaagtgttaggtcaagcaatatatgcattattaaattatgaaaaagaaattgtttgtatagacagtgtcaaggttgaaaatggagactatatcgacattggaaaacctatagttgaaggtaaagttttacctgtggtaataaaaacattagtttttaattaatagaaggaggtaagtaaatgattttaaatacaaaattatttggacgtacttatcagtttaaaggcttatatgatgtaatggctaaagctaatgaagaaaaatcaggagataaattagcaggtcttgcagcagaatcagctgaagaaagaatagcagcaaaagttgttttatcacacataaaattggaggatataagaaataatcctgcagtggcatatgaagaagatgaagtaacaagaataatacaagatgctgtaaatgaaaaagtttatgaagaaataaaaaattggacagtatctgaacttagagaatggctattggattcaaatactacaagtcttgatataagaagaatatcaagaggattaacttctgaaatgatagcagcagttgcaaaattaatgtcaaatatggacttagtttatgcagctaaaaagataaaggttactgctcactgtaatacaactataggagaacaaggaacattatcagcaagacttcaacctaatcatccaacagacgacccagatggaatacttgcatcacttcttgaaggtttaacttttggtataggagatgcagtacttggattaaatccagttgatgactctgttgagagcgttactaaagtattaaaaagatttgaagaagtaaaacaaaaatatcagataccaactcaaacatgtgtattggcacacgttactacacaaatggaagcaataagaaatggtgctcctgcagatttaatattccaatctatagcaggttctgaaaaaggaaatgaagcatttggatttaatggcgacactatagaagaagctagacagttagctttaaaacacggtacagctacaggacctaacgttatgtattttgaaactggacaaggttcagaattatcttcagaagcacatcatggaatagaccaagttactatggaagctagatgctatggatttgctaaaaagtatgaaccattcttagtaaatacagttgttgggtttataggacctgagtacttatatgatgctagagaagttgtaagagcaggacttgaagaccactttatgggtaaactacatggcttaccaatgggtgttgatgtttgttacactaaccatatgaaggctgaccaaaatgatatggaaaacttagccatactattaacaacagcaggatgtacgtattttatgggaatacctcatggagatgatgttatgcttaactatcaaacaacaggataccatgaaacagcatcacttagagaaatgtttggactaacagcaataaaagaatttgatgcttggatggaaaagatgggattctataaagatggtaagttaacagagttggcgggagacgcatctgtattattaggataggaggtatttaatatgaatgagaaggatttaaaagcattggtagaacaattagttggacaaatggttggagaattagatactaatgttgtatctgagactgttaaaaagacaactgaagttgtagtagacaacaatgcttttatagatgatataacagaagttgatataagaaagcaattactagtaaaaaatcctaaggatgcagaagcttatttagatatgaaagcaaaaacacctgcaagattaggtataggaagagctggtactagatataaaacagaaacagttttaagatttagagcagaccatgctgctgcacaagatgctgtattctcttatgtagatgaagaatttataaaagaaaataatatgtttgcagtggaaactttatgtaaagataaagatgaatacttaacaagaccagatttgggaagaaaattttctcaagaaactataaataatataaaatctaaatttggtacaaatcaaaaggttttaatattagttggagatgggcttagctcagctgcaatagaggcaaatttaaaagactgtgtgccagctataaaacagggtctaaaaatgtatggtatagattcaagtgaaattttatttgttaaacattgtagagttggtgctatggaccacttaggtgaagaattaggttgtgaagttatatgtatgttggttggagaaagaccaggattagttactgctgaatcaatgtcagcatatatagcttataagccatatataggaatggcagaagcaaaaagaacagttatatcaaatattcacaaaggtggaacaactgcagttgaagcaggtgctcatatagctgaacttataaaaactatgttagataaaaaagcttcaggaatagaccttaaataaagtcgagggagtgtagaatatgaaaaatgatgtaattcgtcctaatatactaggaattaaaataatttcgaatataagtccagaaatggcacaaaaactagaattaaaatcacatcacaaaagtttaggtttaataactgcagactgtgatgatgttacgtatacagctcttgacgaagcaactaaagcttcagaggttgatgttgtatatgcaaaatcaatgtatgcaggtgctgcaaatgcttcaacaaaacttgctggtgaagtattaggaataatagcaggcccaagcccagcagaagtaagaagtggtctaaatgcagtagttgattttctagagtatggagcaacttttataagtgcaaatgatgatgattcaatagcatactatgctcactgcgtatcaagaacaggtacatacctttcagagatagcaggaataagagaaggtgaagcattagcttatttagtagcaccaccacttgaagcaatgtatgcactagatgcagcaatgaaagctgcagatgttaagatgtgtgaattatttgcacctccaactgaaacaaactttggtggagcattacttacaggttctcaatcggcttgtaaagcagcatgtgatgcatttgcagaagcagtaaaatcagttgcagacaatccaacaggattttaaggatagttagatggatgctataggcttaatagaagtaataggatatgttgctgcaatagaagcttctgatgcttgtttaaaatctgcaaatgttaatattgtaagaattgataaggttggggcaggtattgttactttaacaatatgtggagatgtcggtgctgtaaaagctgctttagaagcaggtgaaatagcagcttccagagttggtacattaagaacatcacatattataccgagaatccataatgaagtaacaaatgctttattcaaaactaaagaacctaaagtctgtgaagtttcagaagataaagaaaaaaactttgagattacattggaaataactgataatgtatcgaaaaatttatcagaaaaagaaaatgtaattttagatgtcaatgaaaacagtggagatactgaaaatttatatagtgatatagataaaacaaacaaaaaaattgaaacagttgatgatagtttaacagaagctaatgaggaaaaaatagaaaatactaatgataaagaagtattggaacaagttaaaatagaaaattccgattttgatagagatgacctatcaaagaacagtgtaaaaaaacttaaagctatggctaagaaattagattcttcaataacttataaagatttaaatgttcttaaaaaagaagaattaataaacttagttaaaaagcttagcagaagggatagatagttatgacacttttagataaagatttagtatctatacaagaagtcagaactcttgtaagaagatctaaagtggctcaagagaaactttctaaaatgagtcaagagcaaatagataaaatagtaaaagctgttgtagatgcagcatttaataatgctactaaattagctaaaatggcaaatgaagaaactggatttggaaaatgggaagataaagtaattaaaaatacttttgcatctatgggagtttatgaaactttaaagaacacaaaaactattggaataattggtgaagataaagaagccaatacgatagatatagctacaccagttggagttgtggcaggtcttataccttcaacaaacccaacatcaacagtaatatacaaaactataatatctctaaaagcaggaaatactatagttttctctccacatccaaatgcaaaaaactgcatacttgaaacagttaatataataagtgaggctgctataaaggctggagctccagaggattcaatattatgtataactaatccaagtatagttggaaccaatgaattgatgaaacataaagatacaaacttaatactagcaactggaggagaagcaatggttagagctgcttactcttcaggaacaccagctattggagttggaccaggaaatggaccagcatttatagataaatcagcaaatgttaaattagcaatcaaaagaataatagattctaaaacttttgataatggtgttatatgtgcatcagagcaatctatagtaatagaaaaatctatggaagaaactgttttaaaagagcttaaaaatcaaggtgcatatgttttaaatgaagaggaaagtgaaagattagcaaaattcatattaagagctaatggtactatgaatccacaaatagttggtaaaagtgttgaggtaatagcaaatttagcagacttaacaaatatacctaaaaatacaaaagttctagttgcaagagaaaataaagttggtcacaatgtagcctattcaagagaaaaacttacaccaatactagcgttttatgttgaagaaaatgtagaagctattatgaacagatgtagagaaatattgttaaatgaaggtgcaggtcatacattctcaatgcatgtaaatgatgaagaattggtaaaaagatttgcccttaatatgccagtatcaagaatacttgtgaatactccttcagcacttggaggaataggtgcatcaacaaaccttgtaccagcactaacacttggttgtggtgcaataggtggaagttcaacttcaaacaatataggaccacttgatttaataaatgttaaaagagtagcttatggaatcaaagaaatagaagaacttggaagagataaatctcaagttgaaaaatcaatgtttgactcaatggataaagaagaattaataaatcttcttgttcaaaaactagtcaaagaactagcataactaaaataaacaatgaaacttatggctatcgctataaatttataaaaatataaactataaaaaactataaaattaaatttttggaggataagattatggcaagtgcaaacgcattaggaatgatagaaactaaaggattagtaggagcaatagaagcagcagatgcaatggttaaagctgcaaatgtacaattagtaggaaaagagcaagtaggtggaggattagttactgtaatggtaagaggagatgttggagctgttaaagctgctacagatgcaggagctgcagctgccgagagagttggagaactaatatcagttcatgttataccaagaccacactttgaagtagatgctatattaccaaaggtatcagctgagtaatataagaataattttaaaatttaaattttgattgaaaaagaggctatctcaaaaatgagtcttactaataaactcaatgtattttgaggtagtcttttttatacatctaataggagatgtgataaaatgggtgttttaacagaaaacgaagtaaaaagaaaaattggaaaaaacaaaaataatataactgaattttatatagaaaaaggtcaaataataactccttctgcaaaatcttatttagctgagagaagtattgagcttaaatatgttgataaactttcagatgtaaacaatgaacctaaagaagttgtaaaagaagtagttaaagagaaaaaatataaatatactactgtatttggcgctaaattggatgaaaaaccagaacatatgactcaattaaatggaaatcttttagtttttaaagaccataaaagaataatattgagaggaaaaatagattctcttgaatcagaaatactaaaggtacagatactttgtcagaaactagatatgccaaagcttgttaaggaattgcaagaagtattagactttgtaagaaatataatgagatgtgaagttttagatgaaaagctagaagactttaaacttttaggattaactcctcaagaacttagagaacaatctcactatcctaaaaaatactttggtataggacatgaattcccaagttatgaaatgggagaagtagtagtagctataaatagtataagaagtaatacacgagaggttgaacttgcagcctatgaagcatttaagggtgagtatggaaatgttcacagagaagatttaataaaggcacttaatagattatcgtcagtattttggataatgatatataaggttagaactaataagtataagtagttggaggacataatggagaatctattaaatgaaatagtggaagaagtaataactagagttaaaaaagaagcatttatagaagttgaagcatcaggaagacacgttcacttaagtagagaagatgtcgataaattatttggagaaggatatactcttacaaaactaaaagacctatctcaaccaggtcaatatgcatgtaaggaaagagttacaataactggtcctaaaggaagtataaaaaatgtagttgtacttggaccatgtagaaatgaaactcaggtagaaatatctttaacagatggttcaactcttggactaaaagctcctataaaacaaagtggagacttagaaggtactttaagtattaaaatatcaacacaatatggtgaagttgaacttgataaggggttaatggttgctaaaagacatatacacatgactcctaaagatgctgaaaaattcaatgtatgtgataaagagatagttgaagccaaggtgatgggtcaaagacctttaacatttgatgatgtagtaataagagtgagtgacagttttaaaacttatatgcatatagactatgatgaagccaatgcatgtggttattcaaaaggaactgttgctaaaataataaagaaagcataaatttaacctactatataaattacctctagggaggatttaatatgaattatgataaccttgtagatttaataacggaagaaatctataaaaaaataaatagtaatgaaataaaaatatctaataaacctaaagctgtgattgtatttgaacaagataacaataaatttaacttattaaaagatgaatttgaaatactagaatttgataaaagtataagggaatgtgaaatagtgatagtttcaagactttgtatgagggggctatcgaatatagcacttggaaattcaacaagtgatgaagaaagatttatactaaaaatgattatgaaaggcaaaaaagtatatgtcctagatgaaggaattgaatacaaaaaatataaggatactgcaccaaaagcattatataagaaatttatgtcatttgaagatgaaatatgtaaatttggtgtagaaattataaaagacttaaatgttataactaaaaataagttaaatataaagaaagaactagaaagtactagaggttctaaaaaagaagatacaaaagttttagataaagatgttttaaatttaaccagtgtagaaagtgtaaaaatagataatgaatttagtttggatttaaggaataaaaaacttatatcggaagctgacttaagaaaaccaactataaatggagttaaaaacatattagttaataaaaaaagtataataacaccattagctgtagattttatgagaatacaccatctcaaactaaagaaactgtaaggaggtaattttatggatataggaaaagttgtaggtaatgtttgggctacaagaaaagatgaaaaattatgtggccaaaaacttttagttgtaaaaattttaaaaactaaagacacatacaaggaaggcttcatggttgcagccgataatgcaggagcaggaaatggagacttagttcttatatccaaaggttcctcagctagagagtcgattgaaaaatctcatgttccagtagatgcaactatagttggagtagtcgattcgtttgaggtgtttgatgaataaaagtataggagctatagagtttaaaagcattgctaaaggtatagaagtatccaatgaaatgataaagaaatcttcagttgatgtattgtacttaaaaagtatttgcccaggtaaatttctaataatagtaggtggagaaacttcttatataaatgaatgtgtagattatggaataaaacttggagaaggatatattgtagataacttcgtaataaatgcaatttcacaagaaatattagatggatttaaaaataagtatcaaaagctagatagtatagtctctataggcgttgttgaaagtagtaaagtatgcgctggaataaaaatgcttgataagactttaaaatctggcgacttagtattagtaaaacttcaattatcttttgctataggtggcaaattagtatatgtagtagcaggagatttaagtagtttagaatatgcattaaaagaaagtgaaaatgtagtaagagaaaaagaagtaatatataagactgtaataccatcagtagacagtcaaataataaaaagtctaataaaataatggggggaattatgagtataaacgaaattataatctatgtaatggtagtcttcatggtacttggagctatagataaatgtataggtaacaaatttggtcttggagaacaatttgaagaaggtataatggcaatggggtcacttgcagttgcaatggttggtgttatatgtttagcaccagttcttgctgatgtattaagaccaattgtagtaccagtatttaatatacttggagctgacccagctatgtttgctggaagtttattagctaatgatatgggtggtgcgccacttgcacttgaacttgcgaaagaccctaattctgggttatttggtggattaatagtaggggctatgatgggacctacaatagtatttataataccagttgcgcttggaataattgaaaaagaagaccaaaaattcttagcaacaggaatacttgcaggtataataacaatacctattggagcattcgttggtggattagttgcaggattcgaggtaatgatggttcttagaaacttagtgccaataataatatttgcagtagttatagcacttggattattaaaattcgaaaatgctatgataaaaggattcacatactttggaaaaggtgtagtaatagttataactttaggacttgctgctgccatagttgaagctttaacaggaatagttgtaatacctggaatgaaaccaatcagtgaaggtatagaaatagttggagatatagcaatagttttagcaggagcattcccattagtgtttgttataacaaaggtatttaataaaccattaatggctttaggaaaagttcttggaatgaatgatgtatcagcagcaggccttgttgcaagtttagctaactgtataccaatgtttggtatgatgaaagatatggacaatagaggaaaaataataaatgtagcattctctgtatcagcagcattcgtatttggagaccacttaggatttacggcaggatttaattctaatatgataacaccaatgatagttgctaaattagttggtggtataacagcagtattgttagctatggttatcgcaaataagacactaaggaaggagaatgtataagatggatatatcaaatatagataaaaatttaattgaaacattagtaagacaaataatagaagaaaaaataagtggaactaaagacacagtagattttgttagaaataaagacattagtggaataacttctataaagttaccaactgtaaaagttagtgaatctgatagattagatacagggaatccaagtgatgtagtttacacaaaagatttatttacattagaggaaagcccaagattaggttgtggtatgatggaaatgaaagaaacaacttttgattggactctaaactatgatgaaatagattatgtaatagatggaactttagatataataatagatggaagaaaggtttctgcttcttcaggtgaattaatattcataccaaaaggaagtaagatacaattttctgtacctgattatgctagatttatatatgtaacatatccggcagattgggcatctcaaaattaataaaaatcaagttaagttaataataatcaaataaataatttaaaatacaaactcttaaataaacacacatatttaaaaaagctatgaattaaaattcatagctttttttataaagaatgttatattttagacgtattttttctatatttactgggagacatattatattttttattaaataatctaataaaatgctctacatttggataaccaatactattttactgataatcttttccttatcactaatcttacattttaaaatattatttttactcgtaatattatcataagaatttgtttcttatttaaaactaattagaattataaagtttattgccatgttattaataaaataaatccagttaaatcgagtgctagttaaagtaataagaaacttttacaatggtttcctttatcgattgaaataaaagttaatatggtataatatctaaagagagaatcttatcaattagaatatgcatagaaacaagtggcttaaaaggagacgttatatggaagagatagtaaagaaggaacaagcaagtatgaatgatatttttttgtatcttaaagctaaatcaaactcattatataaatttgtaatattatataatgagtttatcaataaacctaaagattatggaactggggaacttataaacatggttgaagtacatatgctaacagcgattgaagaaaatccaggaataagtccaactcagttagctaaaatatggaacagaactaaaggtgcaatatctcaaactatatctaaattggagaaaaagggttatataactaaagaaaagaaagaaggaaatgcaaaaactatattactatatccaaccacatcaggagtagagttaagtaaggcacataaactatatgacaccatagatgttacaagaacatttgaatacttaatcaaggagtgtacattagaggagatagatagtttttataaagtaattgatttgtttattaatttattagaagaatctccgcaggaaaataatgattctgaaaaagtgtagctaagattgaagttgaataaagagaaatagatattatagaagtagtacttaagtacacattatataaaaatataataggtataggattaaaaagtttagtggtttaaagtttaaccactaaacttttttaatgtctataatctactattatttaatttactaaaaataaaaaaactcattatattaagatgaaaatagaaaaataactagaaaaatactataatatatcagcttaatacagaaaaaagttaaaaatattgagaaaaataaaaatgaaaacgttttatattgacatagagaaaaagtagtgataccatttaaatatagtttagtagctaaactatatttaaattataataactattttagggggatgttatgaatttaaaacaattaagtgaaaaatacgaagaatatgtaattcaaatgagaagagaatttcataagtatccagaattatcttttaaagaaataagaacaacccaaagaataagggaagaattacaaaaaataggggtcccttttgtatctattgaaccaaatatcgtaatagctactatacaaggcaaaaatgaaggtaagacaattgcaattagaggagatatagatgcgcttccaatgcaagaagattcagatgttgaatacaaatcagaatatgatggaataatgcattcttgtggacatgatgctcatggagctatgttactaggacttgcacatatgctaaatgatataagaaaagatttaaaaggtagagtattattagtttttcaagcagctgaagaagttggtggcggacacaaggagataatacagtactttaaggaaaatggaggaccagatagattaatagctactcatgtttggtccgatattgaagctggtaaaatttctgttgaaccaggacctcgtatggctggtgggtctggttggagaatagacataacaggtagaggaggtcatggttctagaccagatcaaagcatagatcctataaagccagcttgtgatatagttttaaaagtatcttctataccagttaatcatataagtgtactagaacaatgtgttgtacatgcatgtgcaatacatggaggaactacaataggaaatgttattccaaacaatgcagaggtaataggtggatatagatattttactgaagaatcaggcaaaaaagtgtttgacattataaagcaaatgagtaatggtgttggacaagcttatggagtggatgtgaaggttactcatactggaggcataggacctgttatcaatgatgaagaagcagttaagatgtctaaagaaatagtttctaatatagatggattggagttagattcttatgagccaatatgtgcatcagattgttatggtgaaatattaaaagagtattctggtttttattgttatctaggggtaggtaacaaagaaaaaggaataatatatgcacaacaccatcctaagtacaatatagatgaagatacattaaagttaggttgcgaatttatggctaaatatgcagttgaatttttaaataaaaataataactaaaataaatcgaattttataaatgggggggatgaaaatgcaaggtgcattaaaggaaaataagaaaaaaagtggtggaggatttttaggatggattgaaagagttgggaataaaatgccacatcctctagcattatttacatatattacattgatagtagtagcattatctgcaatagcaagctttttaggtttttcagcaacaagtcctgctacaggaaagttaataaaagttatgaacttaataagtgcaaaaggtttagtactatttatgcaagagtttgttaagaacttccaaaacttccctgtgcttggggtagttttagttatggcagttgccacaggagtttgtgaaaagacaggatttttttcaactgccataaaaatgagtttatcaaaagttaaggggaatgcggttgtatttataatagcttttataggagtatttgctaatcaagctggtgatgctgcttttgtattagtaccaactcttgcaggagcaatattttatggattaaatagaaatccattagctggtatattctgtggatttgcatcagttggtggtggatttgcaacagctgtaattcctgggggatgggacgttacgctaacgccaataactgtatcagctgctcaaactattcaacctgcatttgatatgacattattagctagttattatgcactatttgtatctgcgtttatagtagctacagtatcaacaatagtaacggttaaatttatagaacctaaattaggtaagtatactggtaaaccagaaggtatagatgataatcaaggttttgaggtcacaaaagaacaagcaaaagcagcaaagttagcaggttttacagttttagcttatgtagcgttattaattgctttgtgtataccagctaatagttttttaagaagtccagaaggttctttaatatttggagcaccacttatgtcttgcttacagttttttatagtaatactattcttcttgccagggattgtgtatggaatgagggttggtaaaatcaagactgtaaaagacttaaatgatatattatgtcaatcaatggcagcaatggcaccgtttatcgtacttgcaatagttataggtcaattcttaacgctattctcagtgtctaatttagcacaggtactagctataaaaggtggagcattactcaactcattgccactaccaccacaagttataatactgctattcttagtactagtagcgtttataaatatatttgttataagcggaagtacaaaatggatgatatttggaccagtatttgttccgatgttaatgcaattaaacatacatccagcatttactcagtttgtatatagattaggagattctgtaactaatcatttatcaccattaaatgcattctttataatacttttagcaacagtccaaaaatacgataaaaatgcaggtatgggaactatattctcagctatgataccttacactataggttactttgtagtacttgcagttttagtagtagtttggatgacaataggtataccagtaggaataggtggacaagtttggttataaaacatatttaataattttgggaggaaagaaaatggaaacaactgaaataagatacaattttgatgaagtaatagatagaagtggaacaaactgtcttaaatatgatcttaagagtcaatttatgccagaatctccagaagatgcactaccactatgggtagcagacatggattttgcatgtgctcctgagataattaatgcaatgcatgaaagaatagacagaaaaatatttggatatagctctcaacaaactgatgattattatgaagctgtatgtggatggtttaagagaagatttgattggaaaatagaaaaagagaatatattctttagcccaggggttgtgcctgcgttaggatttttcatacaaatattaacacaaaagggtgatggtatcataatagaaaagcctgtatactatccttttgaagataaaataactaataatgaaagaaaagtagttaatagtcctttaaagtttgaagatggtcattattctatggattatgatggatttgaagaattagctaaagatgaaaataataaggtgtttatattatgtagtcctcataatccagttggtagagtatggaaaaaagaagaacttagaaaaatagtagacatatgtaagaaatatgatttgtggataatatctgatgaaatacattgtgatattattcgtaaaagtgaaaagcatataccattagaagtagcatgtcctgattataaagatagaataataacttgtacagctccaagtaagagttttaacttagctggtatgcaattatcaaatatagtaatcaataataaggaattacaagaaaaatggatgcttgaaacagattctaaattagctatattcctacctaatccattcgcaatagttgctactaaagttgcttataatgattgtgaagattggatgaatcaagtaaatgagtatatagatggtaatattaaatatgtagaagattttgttaatgagtatatgcctaaagtaaagataataaaatctcaaggaacttacttaatttggttagactttagagggtatggattagatgcaaaacagcttgaatatgtaatgcttaacaaggcgaaggtattgctagatgaaggatacatattcggagaagaaggagcaggatttgaaagaataaatgttgcttcgcctagaacaattatagaagagtgtatgaatagaataaaatgtgcatttgaaggattataatagtaatatctaaataatatatttgtgtattttaaaaaaagactatgttaaaaaaatatttcaaagcatagtcttttaaagttttatgatgagtttaaaaaatttcaaaacgttactattattgataatcttcacttatatgtttatattagaaataattccacaatatgctcattttctaaagttgcacttttatacaccttgcttcaccaatatcatgtgtaaccaaaatagtagacttattctcattcttaataatactataaacatcatcacaaactaataatctagtctgataatcaagagctgaaaaaggttcatctaaaagtagaatatctggatttacagaaagtgttctaataagcgcaactctttgtctcatacctccagataattcttttggatacatacttctaaaatcccataatccataagtctttaaaaggctttcaactctatctaaagattttttatcttttttgccttgaatttccaatccaatagttatattatccattatatttctccattcaagcaaattatctttttgaaacatatatccaatatttccagtaatctttatatcaccactagtcggttttaaaagattagtaagaatatttaatattgtagatttaccacttccagaaggaccaagcaaagttaatatttctccttctttcaagttaaaattgacatcctttaatacttcaagctcgccttccttagtgtagaagttcatatttatatttttaacttctactatgttgtcattcattatgccaccccctataacttttagctcgtatatattatgttattaacaatatgacctatttgtaccatttttcataaatataatataaatattttgtttatttacgtattttcttagtaacttgtacgtataaattataataaataaattataaggtaggggataaatttgagtaacataataacgaatttaatagagtcagtatttactaatccaataactatattgtttttacttgcaataactgtgtattctgtttttaaaataatagaaaataacagagtatattcatttgtaagttcaaaattagacgaaatcaatagagattataagacaagtgagttttataaaaaggtaagggatgactactatacatatagtaaagaaaatccttatgcagacgtaaatataacttcatttatagaggaagttgtatctgatttaaagcataataatttgccattgttagaaaaaattagaagtataaaaaattcatcttcaataagtatattacttggggttttaggtacgtttgttggtctttctacaatgcttttatgtgttgatactaaagacattataaattcacttccttcaactattagtagtatgcaaactgcatttacaactagtatatttggagttgtattttctctaattataggttactttactaagataaaagattgtgaacatgttttgatacaaataatgttaaaatctgaaaatttactaacatctgaaataactcattttaagtcagaaagaatggatttaaaagtagaagaggtaaaaaatacaataaaacaaataagtaagtctatagaagctattgaaaaatttgataaaatatctaaagatttaaatgactttaatgatgaatttatcagtggtatagaagctttaaaaagccttttagaaggttctcaaagttctattaagacatttgaccagagcgtaagaaaattagataaacagtttaatattttaaatataaaatttgtaaagctttttgataaatatgataatcaagataatataaataaagagattttatttgatataaaagaatcttcaaaaaatatatacaatgccactgaaagccaattcaaaattagagattatataaaaaatataaatgcaggatttgctctatatgaaagaagtgctcaagatttattaactaaattaatgacccatgaaaataaaatctctcaaaatcaaaaaatccttttagatgaaaagtttaccttagatgactcaataaaaaatctctcaagtattattgaaaacttttctaatgacctacaagttaaactggatatgatgtttgaaaattctttagatattcaagataagttagatgttatgtttaataactcttttatgaatgatgaagttcctcttgatagtgaggaattatttaaggatgatgttaataatgtatttaatccttttagtgaagaaatttatgagatagaggataaagaaataaaggtcataggtgaggatgagttaaatgaataataaatatagaagaactgttaacagagaatttgaaaagagtagcttttggccaacatttacagatttattatctactgtattgatggttgtgattcttatcttatttagctcagaaagtatttcaggttctgttgaacaagatttagctaagaatgtcaatgcttctgttgaagaaacttttaaaaaaagcaaaatacctgtgaaggtagataaatctaatgggcaagtaacttttggtgaaaaaaccatgtttgatgtagatagtgatgttttaaaaccagaggctaaagaaatgctaaaaatgtttgttccaaagtacatagagactatttataaagattatggtgactatatatccaaaatagttatagaaggtcatacagatgatgtgggaagttatatatacaacttagatttatcgcaaagaagagcatatagcgttgctaaatttatagtgggagatgaaataggtgactataaatacaaagataaagtgactaagcatattattgcaataggaaggtcaaaagctgaactcatcaaaaatggtgacaatagcgtgaatagagatgcatctagaagagtagaactaaaatacgaaataaatattaatcaaaataaataattaaatttttataaaaaaaaagaaggcagttggtgtgagctttaagccttctttaaggaaaaagtttatttatttttgttgatacttaacatattatagtttttagaagcagtttgcaatatattaaacgtaaatggtcgtttaaaatgcataactggatactactgatgtaaaatatttcattttatataatataaaaattatacagtgtcaattttctatattattgtactataatctattatttaaaatattatgtaaaaaaatatcataaaaacgcatatcatgttataattactagagtattatgaatatggaggcgtagtttgtgatagaaataagtataaaaaataaaaaaaattctaaaattaaaactttgatacttttattgatagtatctatatcgatttatttaactggttgtactacatcagataatggaaataatcaatcaaataataatgattctttgtctagtagtatatcaagtgataagaatgtaaaaattcattttattgacactggaaatagtgatgcaatattgattcaagatggtaaaacttttacattgatagatgggggagataatgatgatgagggattaatggtagattacctaaacaatcaaggtgtaaaagatattaaatatcttatagctacccattctcatgcagaccatttaggtggacttgattctgttgtcaaaaactttaatatagaaaatgtttttgtatcgaatggttcagcagaaacaaagagttatagggactttataaatgctttagcaaataagggtttatccccaagtgtaccgcttgaaaataataagttctatttagaagattcttattttgaagttctaaatacaaatgggggagatactactaatgaacaatctctagtccttgtatatactaatgggaatgataaagttttatttacaggtgatgctgaagaaggtaccgaaaaagaaatactacctaagcttgagaaagtagaccttttaaaagtagctcatcatggttctcgtagtagttcatctcaagagtttttagataaagtaaatcctgaatatgcggttcttttagtaggcaagggtaattcatatggtcatccacatcaggagacaatgaataaattgaaaaaaatgggagtaaaagtacatagaagtgatgagtgttcagatataatatttgaatcaacaggtgatggagtatttacaagttgtaaagatggaagttataataaaggtgttagagaagatggaaactctggaaaatcaaacagtaatacaagtaaaaatgattcttttaaaaataaacaaaatacattcaattcagaagaaatagtgtattttactccaaaaggtaagagttatcactctataaaaaattgtagtgggctttcaagaagtaaaaaaatattatcaggcacaattgaagaaagtaagaaaaatgacccatgtgatatatgttatggaaaataacaaaaaaacaaccaatttatctataaagcttctgaactttaaatcatttaaaaaataaaataaatgcataaaaaaaataagctataatcaatagataatacatttcatctatacgaatagcttatttttttaagtattttttaatagctatttaataactctaaatacaccagttacaatacctacaatttcaacttctgagtcattgagcataattggttccataaaatcattttctggctgaagtcttattaaatttccttctttaaaaaacctcttaactgtagcagattcaccatttataagtgcaactactatctgagaatttaaggccgtattttttttgtctactacaacgtaatcttcatctaaaattcctgcattaatcatactttcgccttttactcttaatacaaaattgttactgccctttactaaactggcagggaatggaatgtattcctctatgttttgttgagctaaaatgggttctccagctgttatttgacctactaaaggaagctctattatttcttgattagctccagaaacatcatttactttactacgttctaaaacttcaatagctcttggtttagtagggtcctttcttatgtatcccagtttttcaagtttatttagatgagagtgcacagttgaagtagatcttaaccctacagcagtacatatttctcttacagcaggtggataaccttttaatgtgatttgagactttataaattccaatatcaagacttgcttttcagttagatctaaatacataacatcactcatttccaaacatattttgtttttatttccatacactttatatttttaattataacataatccatttatatctgcaaacatttgttcctgatttttaatcgtcctcaatccattcaaaattcttgactatatcacgttttacatttttcttatgagctgcataaagctgagtagttgtgacattatcatggtcaagtaagttttgaacatcatatatagaaaatcctgtttggattagagaagttgcagccgttgctcttaatttatggggactatatccattgtctctagtagtatcaagtggaatagatgtatatttttttaccagtgttcttatagcctttgctgtaattctcttattttgaagagacaaaaataaagcatctttttcttcatcatttaatagttcatctcttgttctttcgttttgcaaataatcttttattacatgttcacaagtatgatttataggcattaaaacttctttcccacgttttctatatattttaaattcacctcttgaaaaattaaaagaggagatattgagttctctaagctcatttaatctaagcccgtatgtaacaaataatgctagtatagctttgtcacgtaatttagtttttctccaatataccttttctttctctgtaagcccttcacctgtttctactgattcaagcatcttagcaacttcatctatctcaaggcgcttaatagcatctggctgaggtttaggaagttttattggattgaatccatcagttatattattatctatctgagagtttctgtataagaatttaaatagagtagagatggatgatttttttcttgctaacgctctattgttattttcaaaaatcaatgtgtttttttctgtatttttgtaatatctactgcaataatcacctaagaataaatttatatctcttgattttattgtattaaaatcatcttctgtaatatcttttacacaatctgcatttgttaattctttggtttcaatcaaatatgaacaaaaaaaattaatatcttctaaataagcaagtcgtgtagaaactgcaacagaaccttttaaatatataaaataatccttcataaatacaggaagtttattttccaaaagtagacatttttctatgagttcattttctttgataacaatattatcaggtttatctgatttattatgtacttttataattttcttatcattattcaaaattaaacctcctaaaactaaaatataaatcttttatattattttttgatatttataccaagtgagtataaatatttaatttaatcattttttacatttttaagagattagcagtgctttagatgaaattatcactaactattccctaaatccacatttaaagactagttgaatttaagtactctttttttatttctcaatatatttatagaaatattttaaaatatattgagaaattttttatgctctactaaaatcttttttatataatatttttatatatttctaacgaaaccaaatattagtaaaatatgtatttatttaactaaagtttttaaatgggctgactaagcttaaaatataggatattatgagagttactattgaaaaaataaaccctattgccataaagaaacttataaatatgttatacttaactattaaactggatatattcaagttatcaaatccaaataagtatgtaattgaacttattacaaaaataactataactataaagctcagaccatttaagctattttttaaatcagcactactaagtgacatatgtgtagatatagaatacattaaaaacataaatataaaatacttcaatgaatatacactaggtgttaacaacattattcttataaaattggaaatatcacctaaaataatgtgtataaaaccatttatatttaaattattaatcatacttacatataactttaaatctatattttgagtcactttcatataactatctggcagtaatatcttaaaaattaaaataatcattattgttccacctataataggtgcaattcctataaagaaatttcctatactttgataaagattatcttttttatagctatgacttacatatcctagtataccatcatttttactttctattggtctgaaaaacttaactgaatttattttatgcatgaaaatcaagcacattatcaaatgactcaattcatgaacaaacgttcctatagctccagttacaataattccagtttttccaaaagatgaaaagataaatttattatttagattttctgtaatgctaaaaatcaatccaaatacaataaatattcctatgaaacaaaaaatatttattacacttatttttaaaatttcgattatataaatcataagttaagtcctcatgtaaaagtatttaactactctacttcatatccattacagcttaaaattttacaagcatcttctatatctttttcttttactaagatatagtctgtatcatacgtagaaattgcaaatatgcttattttgttgtctgctaacaaactacttaacttagataaaattcctacaagtgaaaagtctaaaggacctagtatcttaagtattctccactccttttctgacttaacatcagaaggaatattattatttaaacatacaacacttaattcatcatcagttctagttatagagtaaaacttctctgtatctatccatgttggtattttactgtcattatttaatctacatactgcatactcttctaccaataattttaatttcataatgtatatttcctccaatcttatttgtttacttaagattatacattaaaagttacataaaataaaacatataaagtaaaaaaggttcactatagtgtcctatttctatagccaacctttaaaacttaattaaattctaataaagagatatattatctaggttcaattataagtttaatggctgttttcttatcaccttcgatttctatatcagtaaatgcgggaatgcaaactaaatccattccactaggtgcaacaaaacctcttgctattgcaattgattttatcgcttgatttagagctccagctcctatagcttgtatttctgcaacgcctcgttctcttagtactccagccaaggctccagctacagaattaggattagattttgatgaaacttttagtacctccatttcaacatctccttgttaatttgttaaagtatccattacctaaagtactaaatcataattgccatttactaattacaatcatcatttaaagtatacttttataaaaatatacttctataatcgttttaagaaaacctttattttttttaaccattttattatgaaaaaactacaaatttctttatattctataagcattttccaatatttctaaattttttatatctttgagctataatttcctctttatccatatctttgtaatgatttaatctttctaaaatataagcttttatttcttttgaaacagcttctacatctttttgtgctcctccaagaggttcttttataatcttatctattatttttaaatcatataaatcattacttgtaagcttcataacatcacaagcttctttagctttagatgaatctttaaatagaatactagaaagcccttctggagaaatcacagaataaactgaatgttctagcatacaaacatcatttcctactccgatacctaaagctcctccactaccaccttcaccaattacaaaagtgattactggaacagaaagtttactcatttcaagtaagtttcttgcaatagcttctccttgtcctctttcttctgcttctaaaccacaaaaagctcctgatgtatcaataaacgttattataggtctattaaatttttcagcttgtttcataagtcttaatgcttttctgtatccttctggatgaggcattccaaaatttctttttatattttcttttgtatctcttcctttttggtgtccaactatagtaacattaaactttcctatctgaccaatccctccaaccatagaagggtcatctttaaaaagcctatctccatgaagttctaaaaaattagaacaaatatgttctatgtattccaatgtcgtaggtctctttatatctctacttagtgttaccttttcatatgctgatagatgtgaaaaagcatcttccttaagcttttccaatttctcattaagtgaatttattttatcacttaaatctatattatttgccttagaaatagttattaattgtttaatatcattttctaagacttttattttttcactattattttcaatcaaaacagttcctcctttatgccctatttcttgtgcatagcaagaatttgatataataattccttcatttttcttctatctactatcatgtcaataaaacctttttcaagtaaaaactcagaagtttgaaatccttcaggaagtttttgatttattgtttgctctattactcttggacctgcaaaacctatcaacgtatttggctcagaaattataatatcaccaagcatagcaaaactagcagttactcctccagtagtagggtcagttagaactgatatatatggcaatgatttttcttcaagcttagaaagtgcttgagaagtctttgccatctgcataagagataccataccttcttgcattctagctcctcctgaagcagaacaaataattataggtaaattattttcagcagcatactctattgaataagttattttttccccaacaatagaacccatacttcccatcataaaatcaggattcattacacaaataactgttttaattccatttattcttccataacctgtgacaacagcttctgactcttttgttttttccttataagagtctactttttctttgtatttaggaaaatttagtggattttgaaattctacatcagaattaaactccataaaagttcctttatcaatcaataaatttattctttttcttgctcttaagccataatgtcttgaacattttggacatacaaatgaattttcttctatgtcctttctaaatacatgactatcacaacctttgcaataggtccaaaatttatcatctacactattctttttaaagttgtcatctaaagaaatcgtaacatacttagattcttttgatgataaaaatttttttatcataatctatttactccttataatgtagcaaattctttcttcataaagacatcttctataaatttggtatgatgagtatcttctctaaactcctcacttgttacaagtgccttttgaaattctacatttgtattaataccttctacaataatttcgtctagagctctatatattctacttatacattcttctctagtttcagcccaacatattaacttacctatcatagaatcatataaaggtggtatagtatatcctgcatatacaaaagtatcaaatctaacaccaaaacctccaggtaaatttaatgattctatcttacctggtgatggagcaaaattctttgatgaatcttctgcatttattctacattcaatagcatgacctctaaaagtaatatcttcttgtttaaaaggaattttatccccattagctatagatatttgaagttttataaggtcaagatttgttaccatctctgtaactggatgttcaacttgtattcttgtattcatctctataaaataaaagtttttatctttgtcaactataaactcaatagtacctgcaccgatataacctactccttttactatatctactgcaattttatgaagtttttgtctttcttcatctgaaaggtatggacttaaagattcttctattactttttgatttcgcctttgcatagaacaatctctatcacctaaatgtattgcatttgaatgtttatctccaaatacttgtacttctatatgtctaggattttctataaacttttccatatataaatcactattagaaaatgctgctagagcttctgaacttgccatatcaaaatttgaaaaaagttcttcttcttttctaacgattctcataccttttccaccgcctccacttgaggcttttatcataacaggatatccaatttctcttgcaacttctaaagcttcttccttagttttcaaaacagattctgaaccaggaacaacagggatattcaattccatcatagtttctcttgctctagatttatctcccatcaaaatcatttgttctcttgttggacctataaaaataatattattatcttcacattgctttgcaaattcaggattctctgataagaatccaaagcctggatgaatagcatcacactttaatttaagagcaagatagattatattttctatattattataactcttacttatattatttggtcctatacaaatagattcatcagctatatatctatgaaaacaatctttatctatttcagaatagatagcaacagtttttatacctagttctttacatgttctgatgattctaactgctatatcgcctctatttgcaactagtattttttttatcaacttaaatacctcctactacaatggttttatcttaaataaaggttgattatattctactagttcttcattactaactaatacttcaattatttcacctttaatttcgcttgttatctcattcataagcttcattgcttctaatatacataaagtgtcgccttcttcaactacatcgccaactttaacaaagctatctgcatctggacttggagaatcatagaatgttcccatcaaaggagctactactactgatagattctcattagatgtgacaggtgtatcgtttacaactggcttttctaaagaaagatccactactgattcttgttgtacacttaaaacaggtgaacttgtagattgagcttttttagatacttctaatcttaaatcgctactttcaagttttacatattctaagttagttgagtctatggcctttaataattccttaatttcattgatgttcattttgttacccccttgtattattacctggtgctaatattatatcacaaaaaacaaatttataaaagaaaaagtgctgactagagaatcaacacatcaatatatcttttaattttaaattaacaaccagtaacttatatttgttttaattttccattattaatataaattataagtataaaatgaataaaattcaatattttttgcaaaatacaagagaatacaaattaatacctcgggaatttttaagacaaataccaatattatgcaatttagacttcgctttctttcaaattagtatcattttctttatttttacataggatgtactttaatttagctatcaaaacattactatataggttaaaagttattagaattgcaggaattataaagtaaactctagcacctataaaaccaaaaactactgtaataagtattaatcttttatttaaagtaaaaaaaggtatattaaaaatacttttgtcggatgtttctggagtataagaatatataactccaaaaatcaaagtaagcatacaaagtggaagtagtgtataacttgaaattattcccagaaatcctatactttcaaaatatttgctagcactatttgtataaacaaacatgtatccatttaaatatgcgcatatacatgatataatgccaaaagttccccctaaggattgagtgtaccaattaaaaaatttagattccatatacctcacctcctaaaactgtatatataatgatatgcatttaaatagtaaaatatatctttatatgtttctgaataaaattttgttaatttcattaatttatgtttaagaaatttgaagtatagtgtagtatatattaatgtagatgaagttttatagtacttatttcatagtgcttaatcaagttatcttattatggattcaaaagttgtttgtagggttttatattttgttgagctgaaaaatttattataaatgaagggatgttttcgctttggtagatacattagaatttggtcttaaaattttattttttatattatcaataatttggatgggtaaaataatgattttaagaactgataagcaaatagtaatcaatcctttgcttattggtatatctgcagtccttgtgatgttgcatacctcacagagtaacattgaattttttggattagatgtccaatatataagaatagttttgtatataatatattcactgataattttaataggaatatgggctactaacagaagaaatggaattttttagataatctatttctataaaatttaaaggttgctagtaacaaagcactaatattagcgttctgttactaacaacctttattttgattatacacttaaattgaaaatagaatgattgaataagttgacatattattttacattgacagtgattagaacttcttgagatgtatttaaatcatttttgtcgcttagtataacttttaccacagcttgacctgttttattacctttaattatcatatcttcacatgaaagtacactcttatcacttacagatacaataaagtctaaatcttttggaagattatcagtaacttcccagtatttataataactatcaattttcttcgtaattatttttctcaaatcaatactttcaccttttgctatatcaacattatgatatttagagtccagtttatactgattatcttttgtatcaataaaatttaaatcgcaatttacatccacaccattatgagaaagagaatttactacatcgtcatcaatcaaataattattggcaagatttattgaatccatatcttttagacttaaagcttccttaggaacctcttttatattattattccaaaaaataaaattgtctacattttcaagatatgatattccttttaaatttgaaatgctctcaccagttgcataaaattctccatctaaagcctttatattgcttatagtcatctcatctgggtttatatatctttttacaactgctcttaaatttgcatcaggaaaaatatctttaagttgattttcgctcaaaaccttatcatttgaatttattggacttaaagctgctgcagaaataataaatggtattaaattagctaaattcatagtaccctcccacataaattttttattataataatttaatttctatgagagggttctgtttccttgttatatatacctactttcgtacactttattaatataaattaaaataaatttctactattaaacttataaacatattactagttacgttttttagcttcacatctaaatattcgcataccttgtgacataaatttgtcttcatactctgttgtaacattattttcatactcactatttcctaaatcaagagaaatattctttaatagccaattatttgcagcaatttcatttaaactaaactcgaataatttttcattatctgttttaaagtgaatttcgccatcatcttccaaaaccctattgtacatttctaaaaatccagaatgagtgagtcttcttttactccatctatttttaggccatgggtcacagaaatttatataaattctcgataattctttagcttcaaagtaatccaaaatattgcttacatctccccataaaaatagtatattattcaaattagaagcatctgctttttcaacagcttttaaaagaacttcttccttaagttccatggcaatataatttatgtcagggttctgcttagctaaagttgttataaacttaccttttccagtcccaaattcaacatgtattggattatcatttctaaactttaaattccacttgccttttaatttgtctatatcgtctcttaaaacatattttgtataacttaaaagcttttcatctgcacctttttttcgtcttcttctcacaataattctccttacatataaaaaattagtaaaatacatttttattatacattatctcaccaaaaaataaaaagaactctcttaaaatagaaatttatttctataaagagagttctaaacttactaaaaacttaatcttagtggcaccctgaacaaccagagcatcctcctccaccttgatctttcatattttcaggaataactctaaatccaaatcctgtatcttctattattatatctccatactgactatattcatcagagctcattacaaattgtaattctccaacttcataagttaagtcatcttcttttttctcatctaaagctaatccaaaagaaggacctccacaaccaacacctgcaaagtatactcttatattattaggtttatcttgattgtcttttaagatactttttaaagtatcaatagctgtttctggtaaagtaattttcatcaaatcattccctttcaaatattttattaaaacaatatctattatatacccatacaaggtacataatcaattagtttttgcatattttactaaaacttctacctaatattacctaaggctttaaaatattttatataatattttattaccttaaataaataccctatcataaacttagtaaacaaataaaattattattctaaaaaatataataattttatttgttgttttaatattataacacatttgataatgtccaattcatatatgcaaaatttatatactttaaaatatctaagaaattattcaataaaaaaatactattttttaaaaattatcattattgataaagctctactatttatattttttagtgtattcatgtataataagtaaaagcacaacggtatatactgttgtgcttttttgtaattaataaacaatattttggtctataacaatgaaaaatggctactttccataattgatttcatctgacataagcaaaaagggtgtccagctgggtcaatcataactctccagtcatcagtaaattgctcctctgcgattgtagctccacaatgaatttcatattgaactgcttcttctaaatcattaacagcgaaatccatatgagccatttgctgttgagattcaggtttttctggccacacaggcggtttatactcagaatttcgttgaaatgttataccaggatatgttccctgatttgttcctggagcaccaacacatgcatattcttcattataaaatgctatttcccaattgagtaacgctgcataaaattttgctaattcatgtgggtctttgcaatccatcgtaaatgagtacattttgattttcagttcatcatgcataacgtaattacctccaagtataaatttcttcgtcttttcatttttaagctaaattcaaacattaagtatgtaatttatttcaagtatttttctattatgccccaagcctttgttttttgcaatataaagaaaaaattatatattttaatattttataattgttgaaattgtgtaataaattcaactggatacatagtgcgttttgaaatttcttctaaagctaaaccttgttttaaaagcctctttatgacgctttccatactttctgaaatttctataatatttttatcaaaatcataaaacctaaaagttctttgaccccatgggtattcttttatataatgcaaaaattcaatatttcctattctatttatcttactttcccattgtttgatatcattaacctcaaaatacaactgaaagttatttgattgttgatatattggtaaatcatatccaattatagctttataattactttgtaatccaaatccattttcaaatgatacatgttctcctaaatctaatgtaattttttgctccataacatcttcataaaacttttttgatttatttatgtctttgacaattagcaatactcctccaaatttcatcttatcactatcctttctttgttataagtattataacttaaaattttgcaatttcactgtaaaaatcagacatattagctcggtatttttgaggagttattccacagacaattttaaaatctttaataaaatgtggtatatcatagaatcctaattcattacatatatacatcaatgaagttttattattgtttagaagttttatagatttattaatacgtaccaaacgagaaaatgacttcatactcaaccctaggtactgattaaagagtctgtttaaatgcctagaactataaaatacttttttagaaatttcttgtgaagatatgtttccagagttttgaataatcaactgaattgccaaaataaactcatatgagtattcaattttaatattagaaatcaataattcttccaactttaaaatcaatttatctatagataaagattcattaaatatttttttaatttctaaatctaatgaagtattaattatagaaaatggaacaactttatcaataagttcactttgctgtatacctataagcgggaaaaaaccagcaggttgaaattctataattagtataacatcacatctattagcaatatttcctactgtttttggtttagtagttggaccaaataatagactatgtaaccctgtggcatcataaaaaaacaccaaagttacacttccatgaggaataatcgtgtaattatcagaaattattgtttgatttggaaacgatatagtaaaattcgatatccaattttttaattgcatacaaggcaagagataaacaaaattgtcttcacaaactataagtgacctatttttatttataaaatgaatactttctttttttaacatatattatatcctgtcctatcgtgaatatttattaaagtaagaagaatccatattatctctatatatcattaactgcttttaataatagagatagtatgaatactcattagatatttaataaacaaataaattaaaataatcaataaaaaatatagtacttttatctgttattttaatattatagcacatttatagtatttaacttatatccactttacatatgtctaatttatatagttaaaaatgcttatctcaaatacaataattagtccttatacaattaaaccatctgaaactgtaatagtacgactactacttttggctgcttctggtgagtgagttaccataattatagtttgtccattgtctctgtttattttattcagtaaatctattatttctatccctgttttactatctaaatttccagtaggctcatcagcaaataaaatctctggttttccaactaaagctcgagctatagcaacacgttgttgctgaccaccagataactctcgtggtgtatgtttacgtctatcagttaaaccaactatatctaagatttcatctaattgatttttataatcttttaaatttttaccatctaataacaaaggaagcattatattttcctccacatttaaatttggtattaagttataaaattgaaatacgaatcctatatttctacgacgtattatgctcattttctcatcattaaaatgtgatatatcagctccattcatatacacttttccactcgttggagtatctaaaccacctaaaatatataaaagagtacttttaccagaaccagattgacccatgatagaaacaaattcacctttcattacttgtaaagatacctcttttaacactcgagttgttgtatttccaattttatattctttgataatattttttgcttctacagctaaactattatgtgtaattttcatattaacctccataattattcaaacttaatttcttctatcagtttcattttcttcccttttataataggcactatcgaacctattaaagttactataattcccaataacccaacaataataaatgttttaaaatctaaatctggtttcattgaaatttttggtcctgcaactataaagatagtttgaatctcaagtatagatatcacaataccaataacagctccaagtaaacctgaagtaaacccttcaatcaatgtcacttttatattttgtttatcacttagtcctatagatttatacatagctatagaacgttttttttgaatataattaatcagtagattattaataatacctactgtagcaagaagaaaaatgaaataggtcatcttattcataggagacaaaaaactacttatagtatttaaagaatcattattaaattcttcaactgtacgactccaattatatgtatctccaaataaatctcttatctgaatcataacaacatctggattgactgctgtatatactaaaaaaccataattagttttatcaaaatcattaactgcataatgtgatggtataacagcttctacatcatttgcacgggatttaaaactacctactattttataagaaaaatcatacttatcattagatagagttattgtatctcctatagataagcctactttttttagagtatcttcattcaaaataacagaacgtttatcattaaaagcttctattacttgtttttttatctcaaaatttgtataattgattccaaacatagagttatatagttttatattatctgtaccctctagtcttgataatgttacaccattaccagaaatctcattattcataacataaagaggtaatatttttttaattccatccatatgtctaacattttcaataaactcttcattcatctttccatctgcaaaaccttgtaattctgcgtcacgaaacacatctgttatataagttttgacaaagttaccaacaacacttattgcaataactgcagaaatacttataaatagtaaagtgatattctgtattatatttttgttatttttcatatttctagcagctaatttaccctcattccctaaaatatttttataaacaaactcaaaaactatagacatgatatcagtaataagaggaatcaacacaatagtagctacaattaatcctagtaatgaaaatccaccagctagatacaatgtattttcaggggatattcttggaagtaaaatagataaaataaacattatacttcctataaaaagtatagaacgatttgaaacattcttttcttctactgttcctagtacaatattttttattggcaaatggctagcttttttaacaggtatatatgcactaaatgaagaaacgattattgctactataacagatataatcactccaatgggtgatattactactggaattgatattccttgttcgagagaatttcctaacccatgaagcattaaatttaaaacaactacaccaataggaatagcaattaatcctcctatacttccgtataatatactttcaagcatcaatatacgagttacagttttttcattggcaccaatacttctaaatgttccaataaaaggaagacgttctaatgtaataaccttatagctgctgtatatgataaatatactaagggttaatgcaaaaaaacttattaaaaagaaaggcattgtcttttgtctagcatctgaaattatcttagtttcatttatagtatttgataccatatatttttcagtggaaagttcttcggataatttatttactagattttctgtcatttcttcttctgactctataagaactcttgtatatccactgcctttatttataatttttgatagagtctctttgggtagcagtgcatttacacctcttgtattcctcaaaaatactgtatcataagatgcaatatcactaacttgaaaagtataagactttccataaatctgtaaagtaatagaatcacctttttttattttatattttgatgtaaagcgatttggaagaataattttatcaccagaaaaatcagtaatactatcgccattttctaatcgtggcttgttgattttatttagttgacttaagtctgctgatataagactaaattcttcatagtatccccctttattataaatagcagagctttccaatacaccaacctttgattttatagcatttaaatcaggtatgtcttctaaattggttaatacatctggatttttactttggacagatatagtcgctgtaccatacataccttttgccatttttctttgtgcactttcataagataatccaattgagaatgaaacaaaaagtaaaactgttgataaaactatggacagtaacataactgctgttctaatttttcgttctttaatatttgtgaaaatatactttaatataattttcaaatttacaccttcttcctttatctaagatatttcagtataatatttttatactttaatccaaattgaatctctaatagactcctccatacttttatcattctatttataatatttttaatcaaatcacctccttaaataaaaaagattgataaactactatataaatataataatctatcaaccttaatatattttttatttgaccttaattaaccttaattaaataggaaaggtgatataaaatgagctacctaatccaggtatactttcaacagatatattccctccatgaacttcaataatttgcttcgttattgctagtcctaaaccagttccttctattttttgttttgtattgcttcctctataataacgattaaacaaatttgatgcttcttctcttgacatcccttttccattatcagatataatgatttcaattctttcatttaatgttatatgtacacaaactttagtatttttatctccatatgtaaaagcattgacaataagattactaaaagctcgttttaatagtgtacaatcaaaatcaaagttaatattatctatattactcttaaattcaactatatttgattcatattctggataatttaaaatatcaatggataattctttcaagaatcttactaaatcatatttatttttatttaaaggaattattccattttttaattgataggttaattttaaatcgtttataagtgtatttgtatattctatattctttaacatgattgaagcatatttatatactttttcaggtgaataattagtactactatctgtaagaagctctgcatacccttttattggtgaaagtggagtttttaaatcatgagttatatttgaaatccactcttctctcataatatcagttttattttgtatctcatcacttctatgaatttcttcatttaaaatatttaaactattatatatatcagcaaaaacacctttaatattaactggaagatagcttcgttttgaaatatcactaacagcagatgtaatatttgatatgcactttgttacccagtaaccataagcaattccagaaatcaaaattattaaaaatataatccctatgattgaaaatacaattgacttaccacctacaaatttacttccatcaaaaaacatattcactttagatatatttaatggaaaatatataatataaatatagtcatttttattatttttaattgtattaaagtatacagttccattacttgaattattttggttagctaatgttaataattcagaattagaataataatctttatgctcttttggttctaaaaacccataaactctatttccactagaatctaaaatttgcaaccacaattgattttctcgaagcttttctaatccagactgttttacttgtggcttattatctataaatatgatttgttcattaaagttttctgtaaattttttcggccagtcactacgaataaattccccatttggtttctgaatagtaataagtgataagaaaatacctattactgtcaggattaagcaaataaaaatcatgaaaaaaataatgtatgaatgaaatactgttttataactaggtttatgcatttaatcaactcttttcttaaacttttattttagtttgattgttgcttatataaaatagataataattattgatatgtaaaaatttatttaaaaatacaactatctacataaattatatttatataattatatgttatcaagctgtctgttgtatttaataaatccttttgataacatataaaagcaagataattttttccattaaataccttataattatacacaaaatctctatatacgttaaacagtatagagaaaattttcatagaaccatctttataggggatactttataaaagaataaaaaaattataatatataaaaaacttcataggagtgtaacaacatcagtaaagatatgaaaacactatataaaaattcaaaaatattaagaataatgaaatacttgaaattgcttatatcaagaaattttatataatataaactggtcaaatatgttataatattaaattgtgacaagttcatggaggtgtttatatgaaaaaacaaaagtcgccaattttacttgaaatgcttggactatttttgggttgtatatcaatgagtattggtataaatatgtttttaaaaccacatacaattgctcctggaggacttagtggtctatcattagtactaaacaaggttacaggacttccagtatcagctatcatgttaattataggtgtcccattagtaatacttgcttttagaattatgggtacaaaaaattcattaaaaactttatttggaacagttgtattttcagctatagttcaattaacagacccattatcaaaactaagatttactaatgacttattattgtcttctattgcaggaggaatcctagttggtataggtttaggaataatgtttaaatcagatgcttctactggaggaacagacttaattgcactcatacttagtaagaaattcccaggaataaaagctacaaaattcatgtcatgcctagatggaatggttgttatatcttctggtatagtaaatcgtagtttagaaactgctctttactctggtatagcactttgtgtattaataaaaatagcagatatgataatggaaggatttgaccattcaaaagcattttttattatctctgatgagcctgaaagtttaagacaagctataactgaagaacttgatagaggtcttactattcttgatggtaaaggtggatacactagagaaaataaagaagttctattagtcgtagtttctaaaaaacaagaactttatctaaagagattagttaaaagaactgaccctactgcatttgttattgttacagatgtgcatgaggttcttggagaaggatttaaaaatttagagaactaataaaaattaatattttaagtatatatactattttaattaaaatacgatttattcaaaaagagtgtctcataaactttttagttcatgagacactcttttttgtataaaatcaaatgcattttcagtattttaacaataaaaaacaggattatctatattttgagtcaactactttattgaaattttatttagaaaacaatcattactaaataaccaggatagatattaaatgattatatctattgttttttcaattcatattgataacaaggaacattttttacagtatttccagtatgaatttttttgatatactttcctgtacatttaaatcctaataaatctaatgattttgtagaattttggttttcttcataggttattgcaattattttatttaagtttagttctctaaatccatactgtattactctttttgttatctcagtagcaaaatcatgtccccaatagcttggatttatacatatacctatttctgcttctaatgctttaggatttatattattaaaccccatattcccaataactttattgtctcttttatatactatagcaaagtggccaattttcccttttttatagggatttagaaaaaatgattttataaactttcttgtatcttctaaagatttatgctcactaaatggtaaatgttttactactattttatttttataacagtcaaaaaaatcttcaacatcatctaatgatgcaggtcttagtatacaacttctagtttctaaggttttcatttgaggatattcagaatcagacatttctaatccccctttatacattaatctaaatatactgttcatatttaaaatacgatattaattatataaatgttctcaaattaaccttatctttatttttaataaaaactaattactatatgaatctttcaaatttacgaatttatctctatttttatattaaattacttgtgaaatatgtattctaaattatatgttattagatatcatgcttaaaaattctttggttgctaaggataaagatatatcttttaaatggcagtaacctatatttctcttaggtattggctcttttatatctaatttaaacaatttctcattttccaaataatctatgctaaattcttctataacacaagacactccaagatttatatacgcaaattctaaaagtaattcatgagaacccaattctatatccgggtttagttttataccttttgataaaaaatattcatttacataaagtcttgaatttgctttattttctagcattattaaaggcaatgtgtttaattcttccaatgatattttcctacctttgtattctatgtaatcatttgcacatacaaatatatcatgtatttcaatacactcaacaatatttagtgtatcatcttctattggcatgtttataattgctatatctatattcccatctttgagtaaagatataagttctctactcgttctatttattgtagatacatgtatatgtggatacttcttatgaaaaatttctaaatattttaacaagaaaaaacgtgcagctgtatctcctactcctattttcagagaaccgtattctaattttttaaatttatttattctatcttctcctgatgatatcaactttaatgcagtagtgacatgttcacttagaattttcccctctggagttaattttactcccttattgtttctataaaataataaagtatctaattgttcttctaattgctttattgactggcttacagctggctgtgacataaacaattccttagcagcaagagaaaaactcttattatttacaactgcattaaaaaccttataaagttcaagttttatattcatatataattactccttatgtcaaatattagtattatttattttacttataattatatttgaattataatatacatggtactaatatgacaatattaattctttaggaggattttagataatggatagattagttggaactgtttcaagaggggttagagcacctattataagacaaggagatgacttagttaaaatagttgttgattctgttttaaatgcgtcaaaaagtgaaaactttgaagttagggacaaagatgtaattgccgttacagaagctgttgtagctagagcacagggaaattatgctcacgttgacaatattgcaaaagatgtaaaagataaatttggagatgatactgttggggttatattcccaattttaagtagaaatcgttttgctatatgtttaaaaggaattgcaaaaggatgtagaaaagtcgtattaatgttaagctacccttctgatgaagttggaaatcacttaataagtattgatgaacttgatgataagggaataaatccttggtcagatgttttaacagaagaaaaatacagagaactatttggatataacaagcatacatttactggtgtagattatgttgattattataagaatttaatcaaggattgtggtgcagaggtagaaatagtatttgcaaacaatccaaaaactattcttaactatacaacaagtattttaacttgtgatatacatacaagacaaagaacaaagagaattttaagacaaaatggagctaaaaaagtatattcacttgatgatataatgacagcaagtgtagatggtagtggttacaatgaccagtatggacttttaggttcaaacaaagctacagaagaaacagtaaaattattccctataaattgcgatgaagttgtaaacaaaatccaaggtaatataaaagaaataacagggaaagatgtagaagtaatggtttatggagatggagcttttaaagaccctgtaggtaaaatatgggaattagctgacccagtagtatctcctgcttatacaaaagggctagagggaactccaaacgaagtaaaattaaaatacttagcagataatgattttgctgacttatctggtgatgagttaaaagaagcaatttcaaaatacatagttgaaaaagataataaatctgatgatttaacaggaaacatggtttctcaaggtactactccaagaagattaacagaccttataggttctttagcagatttaacatctggaagtggagataagggtactcctattatttacatacaaggatatttcgataactatacaaaatagtatgttttaataagatttaatttttttggattatatatattaacatgaaaatttattaaaacctcttaatagatatgacttttcaagagttatatctattaagaggtttatttaatgttcacagataagatatatttaaataatttaaacaagattgtcataaagttatataatcttaaaaatttatataactctaactcttatttatttctgaaataatatcactcttcaaaatttgtcttactggaataattacagcaactatactaatagtgatatttaaaataatcatacctatgtatagaggtgtatttattttaagaattggatttatatataaatatacacgttttaccataaaataaatcataaattgtccaataacacttccaattaccattataatacttgcatagaatccatataaaaaaccttctcttatcatcataagtaaaaacttattatccgtaatacccatagctcttaaaattccaaactcatgtcttcttgaaaaaattaagtagcttactgtattgattatatggaacaaacttattgcaagaagtacaaatacaataccatatataaataagagtttttgatttaagtaggtattatttttttcaatagcaatggtataatctgttacgatacatctttttacatcacttacaacactttttatgttctcagacaattcctcactgttactatcttctgtcttttttatacttactgaattataattttcgatatcaaagttatttttcatttgcccattcgtcataactatatccataccataatcaccaatgaaatatatgttatttgccatcacacgttttacagtagcagcaactacaaattcttttgttgtataatcattcttattttcttctttaaatttaacaatttcacctgttggtttcattgtctttggcactttaacttttattgtatctcctggatttatatcaactgcatcatacatcccagttccatccataggtagtctaactataaccttattatttttaaccatatcatgggtattaatctccccatctataatataagaatttaatccttctaacataccattgttataaccataaatatttgtttttaaaagatagccaccttcattttgctttgtacaaataccatcaaaaaaagtctttatcctgtaatctttttcaagaggtttaaagaaatttttccaaaatagttgttcttctttaatttgcatagctccaaataaatatcttactggatagacttttgatattccctcaacattgtttaatcttgaaattttatcttttggtatacctacatcaaaatctgttgtttgcatagttatttggtagtcagaatttaaaccatcatcagctttcattgtaagttcattattgtttttagtaagctgtatagagtaactagaacatagaaatataattccaccaagtgataatgaaaacaaaattccaataaacattccccttttttgagtcatgtatttatgagataatacttttgtcatgttagagtgttttacactttctaatattctctttttcttattagtaatcttaaagtttttcatagattctatactagagtatttattcaactgatgtacaacacgtacagcaattaaaattaacaacaataagataaataaaaagcctaaataaatagatttttcacttataaaaaatgctcctggaacaatatcactactcaaaaatatatgtggaaattgttcatatattgtagacgctactccaatacctaagaagcaacctataggaaatccaacaataaaaagtaaaaataactctaaaaatagtagaaataaaagttgtttattattagcgcctaatacttctaaaaccccatattgtgatattctctgaagtattgaaacatggaaaatactatatactgctgctgcaccaaacactccaacaagcaatataattgcatttgtatttagttctaaattttttaagaactcaaatatattatatttttctatattctttggtggttttactccaaattcaactgaaagaggccagtttatataagttttttcttttgatatgttgaattttttcataaatttataattttgctttttaatatttttattttcatcatattttacataaactatataagaatccttttctttaggctgcaaataatcgtttacaaatccctccatagcagtttctgggtttgaaagacttgataaaataccacataacttatagattttaccatctaaattgatttctgttccaatttctttgtttacatttaaattgtttagagaatatgtgtcaagtactatctctccatctttactaggaagagttccttttaataattttctacctgtcatgtctaaatatgaagaatcagcatttaaaaattctataataaaaggttcatctatctgatttttaggttttgtaacgccaagtctatctacaatgtattcctttgattttttattttttttaattttattaagttgttccttatctactttatagaaataatgataatctccactatcttcccttatcttttcaattctacttttgtctgcactatgaactaaagaaccaattcccgtcaataatgctactgatagtactatgcttaaaactatagatatagattgttttttataatgctttatatattgaattgaaaattttactagagacatcatagtacttcaccaccagtattcaccacaactccatcttcaatatggataattgagtcgcatacttgtgctatattttcattgtgtgttaccataagtatcgtttgatggaattttgcactactttcttttaataaacataccacttccattgtagttttactatcgagatttcctgttggttcatctgctaatataagtgcaggtttatttgccaaagctctagcaattgctaccctctgttgttgaccaccagatagttcgcttggaaattttaaacgcttatcccaaattcccaatgtcttcatcagcatttcaatatattcatggtctatatggtttcctttatctaatgtaacaggaagagctatattatcataagtgtttaatacgggcattaaactgtagttttgaaatataaatcctatatttcttcttctaaatactgtcaaatctttttttcctattttagatatgttctttcctttaattattacatcacctgaggttggattatctaatccacctataatatttaacaatgtgctttttccagaaccagaagttccaactatagcagtaaatgtatctcgttcaatttctatacttactccatttaaggcttttactttagtctcaccttttccatagtgtttcactaaattattcgtcactaatatactcatttaatttctcctttcaatacagatatatgttctataaaatattgtaagtgacgataattacactcatcctacaaagttagtttaaactcttacaattctgtaagaatatactaaaacaacatccacttcctagtttagattctactataatgtttccattttctttttctaaaattaatcttgtaagatatagaccaatccctgtgccattttggttttccacatttttacttctgtaaaatcttttaaaaatatcatttagttctctactatcaatacctattccttcatctttaatagtaatcttcgtatatagctccatttttattacagaaatagtaatcgtgctatctgatggtgagtattttattgcattttctaaaacatttacaattgcttctatggtccactttttattatgaactaactttatatctgaaaatggttcgagatttatccttatatttttagcttctgatttattaaagatagtactgatgctttgaataagagtatctttaattagtagttcttctacttcaaattctataactccatcctctaatttagtcattttaaataaggattgtaacaaccagtcaatcttaaaagtttcatttttcatcttttgtaaaaactccttcttctgtaatgtggaaatatttatattctccagaagttcacaataaatggttatatttgaaagtggagtttttaattgatgtgacatatttgatattaaacctttaatcgcttctttttctgactttgactgttctacctctatttctatcatatccttaattttttttacttggtgagaaatttttgacgctcttgtatccttcgtatctggataagtaacttctttaccttccaatatttgatttaacatcaaatttaattcatcatatcttctttgatttattttagtagatactataaatataacaactgtacatattataaaggctaatataaacatattattctacctcattccataaataacccattccataagctgtttttatatattttggattagatgggtcatcctctacttttactctaagtcttcttatatttacagatacaatattatcatcaacataattttcttcgctgtcccaaatatggtgtaaaatttgttcctttaataatatctgacctttattttcaattagataacttagaagcttatattctacagagctaagttccaaacatgctttatttttatatacttttagtaacttttggtccaattttattccattggaatatattactttattattcgatttttttcttattgctactttgactcttgcctttaatacagataaagaaaatggttttgtaatataatcatcaagccctatttctaatccttttacttcatcaatttctgagtctcttgcagtaagcattataattggtatatctgacttttcccttattatttgacatacatcaaatccatctccatctggaagattgcagtctaagattataaaatctatatttttactattaaatatatttaatccttcttgttttgtataagccttaaatacattaaatccatcattctcaaatgcataaaaaagaccttcatttaagtttatatcatcttcaataattaataagttcaattttactctcctttagattttttagataaataattattttcttgcattatcatactaaaaatattttaattttatttatttcactaaaaagattgtatttaaatttgttttcaaaataaaaacatcataatcaagcatatagttatatatttcccaatttaattacgcttaaattgaaaatataacgttattcttatataattaaattatacaacaataaagttatattttttaaatatatttttactagggggaatagaattgaaaagggttgatgagagaaatactatgtttgcaagagcaaattacaaaaaagatagtactgcttataatgattattataagaaaaatcctgacaaaaaagaaattgatgatagtataagaaatagaccaaatttatgtagtgaaggaacaatgacttacaatgagttaaactctccaatggcaagtagtgcattcgattttttatctgatatcaaatctttatgcgaaggaaaagtttctgatactaaagtagatgtagatgcaaagtcaatgacaaaaaaaattaagggtcttgcaaagcagtatggagcttctgtagttggtataactaaattaaaagactatcatatttatacaaataggggtagacatgaagaaaattacggtgaagaaattaatctaactcataagtatgcaattgtatttggatgtgagatggataaagaaatgataaatagagctccaatgatatgtgaagttatagaaacatcaaagtgctatgtggatgcatctatcgtcggcatgattttaagttactatataagaaatttaggatatgatgctagaaatcatatggatgctaattatttagtaatgcctgtttttatagctcgtgatgcaggtttaggagatataggaagaaatgctatacttacaaataaagattatggctctagacttagattaggtgttgttactacagatattcctcttttagaagatgaatatgttgattttggactagaagatttttgtaaggtctgtaaaaaatgctcttttaactgcccttctcattcgctttctaatgatattaaaattggtgatgatggaaaatataattgggtaattgaacatgagacatgctatattaaatggagatatttaggtacagattgtggtatgtgtatatctgcttgcccatttagccaaaatctcgaaactataaagaatactacttcatttaagggtaataatgagcttattcaaaaagctttagatgagtatacttcaaaatttggtaaaagaatatttatacctggaaatccatcttggttgaaataattttatttaataaagaatctgtactagaatttatcataggacaggttctttattaaatatataaatttttaaatactttttctcgtttataacaattcagcaatgtttttagtctataattgacattataaaatattaaactaaaaggagtaactgtatggaaaaaatattagtagtagaagatgattctatattaaataaaactctatcatataacctaattgaagatggatatataattacttcaaaatttacagctaaatctgcactaaagtctatttttgaatgtgaatttgatttaataattttggatattaatttaccagataaaagtgggtttgaattatgtaatgaaataaaggaaaattacaatataccaataatttttttaactgctaatgatatggaatgtgatatgattaaaggctatgaacttggagctttggattatataacaaaaccatttaatatcaatttatttaaacagaaagttaaagcttttttaaatcatcttacaacaaaaacaaaacaagattactatagggatggatatcttgaaattaacttttctgagttatctgccaatataaatggaaatcaaattatatttacaccattagaatatcgtactttaaaactgcttactgaaaatcctaaaagtattttaacaaggaaagtacttttagaaaaactctgggatatagatgctaactttgtagatgaacatactttaacatctgttataagtaggattagaagcaaaattgaaaaagacaatcttaagtatatcaaaacggtatatggtatgggatatatgtggttaggtgaaagaaatgaattttaaaaaattttcttttagttctatttatttaataattgctgttggtataatttttacagctattttatttaatatttcaatttatctaataactgatgatttaaaactaattgctctattattaatatatacaatagtactttgtggatttatagcattaataatatttttacttcataaaaaaatagttatattttgttctaaaatatgtcacactttagatagtatgatgaatagtgaagacaatattgaaattgaattagaagaagaaactattttatcacgtatcaatcacagattaattagaatgtatgaagttattcaagaaaatcgcaatagtattgctatagagaaagctgatttacaagaactagtttctgatctatctcatcaaattaaaactcctattgcaaatttaaaaatgattaatactactctactaaatcaaacatttaaaacagaaattcaaaaggattttttaatggatatggaaaaccaattagataaattagattttttaatgcaatctatggtaaaaacctccagactagagacaggtataatcacactatctaaaaagaaaaattcaatttatgaaacaattgctacagcacttagtggaattttgtttgatgctgaaaaaaagaatattgaagttacagttgattgtgacccaaatttatatataattcatgacaagaaatggacttctgaagctatttttaatatattagataatgctgtaaaatacacaaattctaatggtaagatacgtgtagctacagaatgttgggttatgtatacaaaaatagatattattgataatggaaaaggaatatcagaaagtcatcaagcagaaatctttaaaagattttatcgtgaagaagatgtacatgacatagaaggtattggaataggtctatatctttcaagaaaaattatatctcttcaaggtggctatattaaagttacatcagatattggaaaagggtcgactttttctatcttcttacctaataaataaatttttaaatattttatttgtaatgattctgcaacattttgattttatactgtatttacaagatgttaaggaggtattattatgagtattttacaagtaattaatttaaagaaatattatggacaaagttcaaacattacaaaagctcttgatggtgtaactctatctattgaaaaaggcgaatttatttctattgtaggtacatctggtagtggcaaatccacattattaaatatgatgggaggattagataatcctacatctggaaaggttattataaagggtaaggaattatctactatgactgatgaacagcttacaatctttagacgcagaaatataggttttatatttcaaaattataatcttgttcctttacttaatgtatatgaaaatattatcttaccaataggattggatggagagaccatagataaggattttataaatgaaattataaatatgctttctcttgaagaaaaattatatgatatgccaagtaatctttctggtggtcaacagcaacgtgttgctatagctagagcacttgtaacaaaaccagctattatactagctgatgaacccacaggtagccttgatagtagaactagttcagatgtactgagtttacttaaagtgacaagtaaaaaattcaaccaaacaattgtaatgattacacacaataatgaaattgcacaactaactgatagaattattcgtattgaagatggaaaaattgttaactaggaggtgtagtatatgtttagaaataataatcgcacatttataagaaaaatagctttaaatgatttaaaaattaataaacttaaaacatatctttcaggtatcattataatgatttctacatgtttattattaacagtgaccttagtttcatataatgcttctgtagatttagttaatgcatctccatatcatgctatatataaatctgtagatgaaaaagcaaaaaatatactatataaagataaaaaccttagtggcgtaggaacctacaaattaattggaagtaataaaaagacagactgtattatgtcgattgtttatgcagatgatacagcaattaaacttatgaattttcaaccattgaaaggcaaactacctacaaataaaaatgaaattgctatttcagaaaaatatttacaggaatttggtttagataaagatattggagatagcattaaattaaattattatgatgatattacgaataaagaagttcaatgtgattttattattgttggatttctagaaaattattatcaagataatgccaagcaatactatacagtcgtttcaaatgattattttaagaatatagcttctacacctttacaaaataaaagtaatacttttgacgagtcaagacctgatactgtagatgtattagttaaactatcagaagaaaatacagagaaagattcagcttcaattaagacacagttaaagaaaattggtttatctttaggtattaagaaatataatatatacttaaatgataactatattgaatcaaatttaattgatggtgagcagattattacagttttagtagttggaatagttgttcttttttctagcgtttttgttatatatagtattttttatatttcagttgttaattcagttcagatgtatgctaagttgaaatcgttaggtatgacttcttttcagttaaaaaagactatttctctacaaggaaatattttgtcaattatttttattccattaggggctatagcttcttgtataattgcttacataattcaaccattagcatggcaaatgatagctgatttatttataattttaattttatcactggtaatgtttttaactgttagaatttctttatttaaaccagctagaattatttctaaaatatctgctattgaagccatgcaatatacagaaactaaatttagaaaacaagcaaaaaattttagttatataaatataaaaaatctagcattaaagaatatcgagtcaaatagaaagaaaaatttgattgcattaatatcgctaagcattagtggagttttatttatttcaatcgctaatcttgctaattcaatagatttcaaaaaacaactatctcaacaatttgtctataacgaagattatataattagcattaagagtgataacttatatgagcatattacagaaatccaacaaaataatccactaacagattctcttaagaatgaaattaaatctattcatggagtaaaaaaattaattgaatccaaatcaattaaaagtaatattatagaaccttacatcaaagatagagacgaaaaacaatttattactctaattaaaggtattacgcctgaactttcaaaatcacttgaagaatatattgtcagtggaaaaatagactatacacatttagattcagatagtttaattataaataaatatagaacaaaatcttatggattaaatttaaaagttggagatacagttacatttaatatctttagtggaaatgatattattaaaaagaaaatgaaaattataggaatcattgacaattccaatacaggaggtatgttttttgcttcagacaaaactttagaatctctaacaccatataatacaaatttagatttttctattttaatagataaaaagcattctaaagaagttgaagaaaagttgttaagtataattcagaaaaattcaaatttaatgctttattcatatgaagatgattatagaatgattactagagcatttcaatatataattatagcttcatacatttttgttggtttaatttcttgctttggtatactaaatatgaccaataccctaataaacagcgttttaattagaaaaaaagagtttgccttacttcaagccgttggaatgacaagaaagcaactgcgaaatatgctttatagagaaggtctaaacataagtatcaaagctatatgtacttcaagtatactaggttattttggttcaaatctactttgcacttttataaaagatgtaattagattagactttattaattttaaattttctatatttactattttaattttttcattcgtattaattggtatacaagttttagtgactgaattacttataagaaatatagaaaaaaaatcacttacagaacgcttacgttctcagtaagaatgtatataaaaaataaccattttttatacaagttttaacataattttttaaaagctaaaaggatagaaaattttgactttacataattttctgtccctctacttgtttttattttatacagatacacttccttatatctccaagcaacatcaccagagacataaacaagcatattccttattttctaaatatgtcaattgcatgacttgtaactcctactaaatcttcacgttcacaagtagcaaggtgatattttaaatataacgcaaatgcatcatcatccatagagtctactgcttcacgcatatacaaagccaaaccatctgatgcgacataatgcagtctagttacattaaatgcagacatcaaatcatcaatgttttctttacgtacaagctcaaacaaatcctttggttcagacttagcagcaaatgtctgtggatcaatcaaacctttttcaatatattcagatacattaatatttcctctatggaacccctcgtcaatgagacagccatcagatataacgtatgcagcaaaaaccacaccaccaggttttgttacacgaattgcctcatgtaaagcttgttgtttatcttctttgttataaagatgatatagtggtcctaacagtaacgtaatatcatatttattatctgggaaaacagataaatccatagcattaccctgagtaatgcttatattttcatttgattgagtatttttatggaaaacctctatattatgttcgactaattccactgcgtcaacatcatatccctgacgtgccagtgtgtgagaataacgaccagttgcagcgccaatttcaagcacacaatcacctgattttatgtacttatcaatgtaatgcatagtagtgagaaattccaccattccatgttttaatgcaagtcgactatcttcatcataagtattataaaagtcaattaagtattgttttgtttccataatctcacctcttctatattagttaataaacatcaaatagacaaattccaatctggtttttcttgtcttataaaagctgttaatatatttttcaacattttttcagcactatatctatctaatgttaatttttttgttgctgttaagacagctatgccatgagtataaagaaataaatctaaaaatattacttttgcacattccaactctattccaatgctttccgaaaaaagtcttgcctttttttcattgtcaatttctttataaaaatcattcgcctctttcatcatcaaatctaaatcatttataaataacaacttaaataaatacgtttcttcttgagcaaattcaatgtatgaaagcggaagcagtaaataagggcttacacttttagaattacgataattaacaacatactgattataatattcatatgcaaaagcaagaaattcattttttaattcattcatgttttcgtaacaagtaaaaattggtcgagtggaacactgtaatttacttgcaatactcctcgcatttacagcttcaaatcccacttctcttgtaatatccaagactgtattcaaaatcatttcttttgttatctttactttaggtggcatatatgttcacctctccattaaatttttataaaacacatatgttatataactatagtaacatatcaagaaattatgtcaagaaaaagctttgcatttttttgcaattcctaaaacttataaataaaacatgagttgcaattaatctattaatagataacagcaactcatattttcctttaaatactcttctttttgtctaatatttcatatacacaatcttctattgaattaatatctttttcttttctttttttagaatcaattaaaatgaaatacagtataaaacctacagcaagtccccatgttccgcctttagcagcaattacacctcccataagtccaatcaatcccttctcaacacctgtattacatagctccattgatagctttgtacataaatatccttgaactaaaagtgttactgacaatgctaatggtataagaggtgtagcaatctgcgcaattggataaaaacagataaaaattgctgaaacccatactaatgtacccatgccactaaaaacagactgcatggcttcctttccaaccttgtacctttgagcaacacttcctgtaagtgtcgcagctaatggaccgcacattggtatatatggagaaaagattgccataaaaatatttcttatcccacttataacattagacctatttgaattgaaatctatatattcatcttttctattttcactttcagaaagtactaagttttcacctgttataaaatcaccaaaggcaattatgtatatcataaaagccattggtatcccttgtataaataacattacacttggaaaacctattccaaaaggagatactgtatttatcagatttttaaaatctactatgtaaactaaattgtcaaaactaaatctaggaatttctatttctttactaaatatacctactattaaactcactaaaatagctgatactacaccatattctcctaaatgaaataaaaatttattcttaacttttagagtatcaaatctttcagaaaacattacaaaacaagcaaccaaaattcctactgttatagatataggataagaatcaaatctccctttaggattaaactctgatattatagtcgatataccgacacccattagtattccacctttaatagaatttggtatcttactaactaactttccagctacaccagttatacccattaaaataaatattattcctaaatctatttgtaaagctgttaatgcttgtattctttcaatgcccatgctgaactttaacaaatatgcagttgtaagagttatagaagctgtaatccagccaggtacaactgggtctcccataaaaacatgcaaacagtataatattgagttaataatagccatactccatgccacttcatagggtaatcccaaaatttgtgtactaaggccaattgtgcctaaacttgtcatacttgatattataccttgaatagcttctggtttctcaaatctgtaatgtataaatggaattcttatcttaaacattccaaattttatatgaggttgttcccttctagcgagtctttccataacttcactccacctttcaataactcttataagtttacaactttataattgtttataaattgtcaatgtcattaaaattagtatataacatgcaaattatataaacaataaattaaatctataaaattgatagattttgtgcatatatagaaaaaccgcttcatttttagttacttaaatcacttaatattagttatttaaatcacttgataaaagttttttataaaattcaatagttctattccatgattcaaactgtccttttgaatttccttctacagttccacctgaagaaaaaatccctccactcatactcatacataaagtctcctttagaggcataatatatggaattggtaacggatgacccatattattgtatgttaataattctacgttatatggataattattttcttcaaagatttctaatgcctctaaacaagcttcataactattccatatgttatcttcttttccagcaatcataagtatatctgctttggaattttctatttttattctagcctcttttctattctctgctcttttaagacttttcttataagtactattaaatccaaatggaataccttttgatatattttttttctgttcttcaaagaatatatcattgtctactttgatatatggaaatggctctcctttatatgaccatgatgaagtatcatttccactcatcaatccattaagagcttggaaacaataaatgtgaggttgtgatactacaacctttttaatttgttcatatcttgaagcaagtaaaaaggccaattctccaccctttgatgtcccatgtacaaatatttctttagtactggtaatttcattttcactaatccactcaaatactttttcaaaatattctaatggaacctcttctaatttatctggtaacccttctaaagcaaagtatgcaactgttagtacattgaatcctctagatgcaagtggagctgctaaaaggtctagagcgtctaaatttccatcagaaccacctagcattaaaattgttttattattagaattttgtttataaaataattttcctataaactcatcagatatgtattttgtggtaatatcttctgatttaaatattctctttaattcaacttcttttctttcagtagaagtttcaaatatcatattcataattattggtttatcaatagatatattttctgcaaaatttttaccttcagttttagatttttccagcgaataaattaaccccatacaattatcagccttataagtaccttctataggttcaactaaatctaaatctacttctcctttttcatttgaacaaaacactccataagatgaaaattcttctcccttgcaccatggaaattccattttcacacttattttaagtttagtatttggaattaagtctgaaaccataatcttaagtctttcatccacaaatgattctacattgtatacatttactttcataatctatttctccttataataattatttatgctttatatataaaacaactttatctaatacaacataaataaatttttaaattaagacaccatattgactatttcattttatcaacatatttcatttttgtcaatatattgtcttttttagtaatttaaaattatgtagtctatatgaaatccagttgatttttggctaattaaagataggaatgctattaggtttaaaatatatctattcaaaataaaaaaccactcattttaagaatggtttttaatataaactatttgttattaataaggatatttttttatttaaatttatataattgaacatctaatatttaatgtttaataaaattatgcatttgcaaaagtatatatggcattaactcttgctacatataaattctcatcactacatccaatatatctagcatatttttcaatcttttcttttgcattttcaacatcattttcatcgctctccattaactcatttatataaatatccattaatgacgctttatattcttttatatcatagcctaaaaattcagtcaatctctcaatttccttactaaaatctccatcttcttttaccaaaaattcgtatacatcttccctatatggatttaaagttattatttgttttactactttgcattcgtcagccttcccaataaaaccatctttataattattaaataaggcattagatttttttatagattcttcatcaatataagaatgtaccgcagttatacgattttctataagggcatctacaacagcataatgaattttaaaacaatcattgtataaataattgctcattttctttattgtcgattctatttctaagaagctagcgtgcccattttttttatttttatttggtataataaaagttttattcaagttattaaaaagtctcttaaaatctaaatatttttcacaataaacgcttttaaaggtatcgatatctatagttataattccaaaacttactatagtctcaattcctttcttaaaagactcttctatatatttttctcctaaacttaaacctctatcagatatttgctttagattttgaaaactatttaaacaatctctctcaaagtttttagatatttctaaagcatataatttaaagattttccttatcttattataattattttttgtatcatcaaatctgataatagctccatttacatcaaaagtaatcattgagttttaacctccccattagtttcatcaataaaataaatttaatataaactttataatcataatattaaacttatttatactataattattaatttgatgataaaagctattttccttctaaataaaaaatttgtctaaagtttctaaaaaatttagacaaatcttaggttattattctttaaattatttttaaattattccaaatacaccaaataatattggtataaatatagctggtaacaaattagctacttttatattcgttaatttaagtacatttagaccaagtcctataattaataaacttccagctgctgtcatttctgtgactacaggatcacttaaaaatccatttaaaaatgatgctcccacacatataataccttcatacaaaaatacagatattgcagaaaacattacacctatacctaaagaagcagtaaatataattgaagctattccatctataacagattttacaaataaagtatcatgacttcctgtaagaccactttctaatgaaccaactactgccatggctcctatacagaataataaactagatgatataaaaccctctgctatagaatcttttttatttcctttagaaaatttactttgtaaaaaagcacccaacttatttacccatttgtcaatatctattaattctcctatcagagcacctacagctacggatattattgtcactaatgtgttttttccttctagtgctcctgatataccaatgtacaatacacataaggcaattccattcattatagtatcacttactctttgaggtaatcctccttttattataagacctactatacatccacctgcaattgctagactatttgctattactccaaacattttttctcccctcgattagctaattgaaatttatcctattattaaaacctaagcatctatactttgtattggatattttaaatattccaaaaattcttcaaaaccttttctagatatatttacagttttagtatttatgttaggatgaaaatttaagtaatcttctttaattacatctttatctatgtaaagctcaacttttctttctgtatcatttattaatgaaaaaggatttacacttccaggaagaagtttaagtacattgtatagtctttcaggtgaagcaaacgataatctagaacttcctatcttatctttaagtgagtttaaatcaacttgtttttctcctttaactacaataagataatacttatttcctttggcatttcttaaaaataaatttttacattgacacccctttgttattccatctaaaatgactaattgctctgctgtatatacagcttcatgctctactacatcatattcaacatttaatttatccaaaatatcatatattttagtttcattcatgctagattcattttcatcttgttcttttttattatttaaatcactcatacttttctccttaaacacttcatcataatatcattgtgaggtattattctactatagctattgctcttactggagctccatcagcatcattatacttaaatggtgctgctataaatagaaatttttctggaacattttctaaatttgtaagattttctatgattatttttcctttttcaaataaaatatgatgcacttcaaatactgatgtgttatatctatccactgatagcatatctattcctatgccttttatattagtattagctatatagtttgcagcttcttttgttaatgtaggataacctacatagtactgctttttatcccaaaattttgaccaacctgatttaaatattataaaatcactattttttatttcatcttcatatttttttagatattctaattctatattctcatttcccttttcaagttccaatacataagctttcccaacaaaattttctatatccaacttatctagggtctcacctttagtatacatatgtcttggtgaatccatatgagttccattgtgagaaaatacactaattaatgtttcttgataaccattttcttcaataatagctactttcttgatatctggtctattaggctctgcatatacaggcatgtcattatgtgtcacatgagttaaatcaaaaaccttcatctttatataccccctatgtttttattttctattatatacctaaattcattttatttctatcagattttattccattatataccatactactatatattttttataaacctcaagggatttaccgaaaaatcttggaaagaattatcagtaaatataacatcttcacccaaaaaacgtttataccttccttcttctttctttaaagtaattctctgtttttgtgaatgattattaaaaaccattatcttaagaggaggtttttttctattagtctgcactctttttaacatgtattttatgtgcatatcagcttcaggaaatgaatatccacaaaatattaaaaggtcagtatctcttaaagttttttctgtttcattccaaacattacttaaaaatatgtttgacatattcttaaaatatgttggtggcactataataggttctgttaactcaccacactctaaacattttgtctctgaactattttcaataagcttcatgacaccaccttcatgtggtgtaagagttacactattacaaatggggcaataaagccaattcaatgacccatgtatcttatataatttgattaatggttcttttggttttctccaatttaactcctctttaaaatttgtaaactccacaccataatcaagcataattggcaaatcattcttatctcttaatccagtaactgtattgtctatatgtatatcataatttgcactaataaaagtagtatcaagaagcaaatcattttccaaaagattttcaactaaaagtttatgatatttattatctgttctaggtgtattatgaattgcttcagccattagcagtattaaatattgtcttaaaaaacgtatactatcacttctgttatttagattttctagtccaaaatttctaaatgcttcttttctttgttctgctaagtctaaaagacctaaaacttcttcaaaggtaggaaaatttgcattatctatattatcttttactatatcaatattgaacatctgtttaaagaaaatatacaattctctattcattttggtattataatttgtgggatttagttttttaaaatattcgctaaaaagttcattttgaataggtagattctctgctgctgaagctcctgctcctaaaaatattgctattttcatatagttcctcctaatataaatattactcctatttttatatccattaaatatccatatcatttattttatgatacaacaataaagctgtcttttactagaaaaaatcctattacaagacagccttatattatattaaatctttaataattcgtaaatagaaagagcatatatttgagtagcttttataatatcctctactattaagtattcattagcttggtgttctgtttctggttttcctggaaaaatagctccaaatgcaacacaattatctaaagctcttgcgtatgttgctcctccagatgaaagtggtgttccatcaagaccagtttcttcttcatatacttttctaagtgtcttaacaagaagagtatcttctggaacatagattgaatccaagaaatcatattcttcataatttaaattgtatttatctgtcattttctttaactcttttacaaaatcatcctttttgtatgttactggaatccttacatctattcctgcaaattctttttcgttatcaatagttactctacctatatttactgttagtttacctgatacatcatccttgcaattaggaattatattgtttccattagcatcttcaccaataacttctgctaaaaacttaattatattagaatctatacctatattattaagagctatacaaagtctagccactgcatttataccagtatcacttgctgctgaatggacactttttccaattatacagattttattaccttcaacagtatactcaaaatttaatttatcaagttctttttttaatttatcagagtattttccaatatagattgctttacctggaactgcatttaaagcctttccaactgacaactctatatcacttttgctatcacaagtcaaatgaacttgtaaaagacctttctctgcatttgttattgggaatctagaatctggagtaaatccatagtttggtatttcttcattattttctttatatttatttatacatctccaaagattttcttcatcagccccaaaaatgaatcttatcctcttattaaagtctacatttaaatccataagagctttcactgcataaattgctgatattgtaggtcctttatcatcttgtgttcctcttccatacaatttaccatcttctaaaacagcttcaaatggagggtaattccagctttctaaatcaccttctggaaccacatcaacgtgaccaagtatacctatcattttttcaccttgtcctatttctgcatatccataatatccatctttgtatactgtcttaaatcctaaagatttacataagtctaatatacctcttaaagctttatctacattttcaccaaatgggcaattttcagttgcttcagatataacactaggtatttttacactttcttgtattgaagaaatcatttcatcttgtagagaatttactttttctttaatttgctctttcatattatcacccttcaattttcatcataatatactaataaatattttgacctttttaaaaaaaaatatgcttattttttcagtttttttataaattcaatcgcttttaaagtccccatttttgaatggtcaaatgtaagtccaccttgaaaataaacattataaggaggtcttattggagcatctgcacttaattctatagaagaaccttgtataaatgctcctgctgccattatgacttcactttcgtatccaggcatgtcccaaggaacaggttttacataagaatcgactggtgcagcttcttgtataccttcacaaaaacttattacttcatcagcattattaagtctaatacattgaataatatcacttcttaagtcatcatattttggtaatacatcatatcctaatttttcaaaagctcttgagcaaaagatagctcccattacagcctgagatactatataaggcgccaagaaaaaaccctgaagtacatttctagttgttccaaaagtaagaccacattcttttcctattccaggagaagtcattctataagatataagctcaatcaaatcttttctaccagctatatatccacctgtcaatgcaagcccaccaccaggattttttattaaagagccagccataacatctgctccaacatcagtaggctctttggtatctaaaaactcaccataacaattatcaaccattactatagcttctggtttaacagactttattacttctatagcttcttttatatcactaattgaaagtgattttctccaagaatatccttttgacctttgtatcataacgagtttagttctatcatttattttgtttttaattccttctaaatctaagtttccatcctctaaaaaatctacatcatcatatgtaacaccatactctttcaatgaacctttttcttctcttatgcctataactccctctaaagtatcatatggtctaccagtaacagataaaatttcatctcctggtctaactataccttgtatacataaagtaagtgcatgtgtaccatttacaattattggtcttacaagagcatcttctgtattaaatactttagaataaatttcctctattttttcacgaccaatatcattatatccatatcctgtagtccagttaaagtgcatatcacttagtttagattcttgcatagcttttaaaactttatattgattatattctcttatttcttttatttcttcaaacttatcttttatttcttccattatttcttgcgatagtttaaaagtatcatcatctattccatagtagtcttttaataattcttttgtctcattaagcattttatcacctgtctctttattattttatttaaacatgtaaaggagactattttactaaaacaaataaattatagtttataagttagtataagtctcctctcaatcatcttaaattaaattaattatctatctgttgttattattattgttgttttggttttgatttgttagattaatatactttccaggttgtatagttgatacagcatgtttataaatcatgttttgttgtctattatccccttctattaatattatataactatcaaacccctttacaagccctttaacttgcactccattaactaaatatatagtaacaggtatcctttctttccttgcattatttaaaaacaaatcttgtaaatttaaaactgtatttttcattagatttgtaccctcccaagattaaattgaacttctaaaatattcctaccttatattctatataagttatgacaaattttcaatattaagttgtatacttaaaaatttatatattattttatagaatctttaatatataagattatttcattttttaattcgtctatattttcatattggtctaaatcaaaccatcttgctgttttatatcttttaaaccatgttatctgacgttttgcataccttctagaatctcttttaattatttcaatagcttcttcgtatgtatattctccatccagatacttcaatatctctttataacctataccttgcattgatatcatatcttttttaaatcccatacttaaaagtttttttacctcttcaaccaatccatttttaatcataatatcaactctcatatttattctttgatacaaatgttctctatctctatttagaactattattattggttgatattcttcattaaattttaaatcacttgaaaaatcattcattttcttaccacttagacaaacttcaagagctcttatgacccttttagtattgtttttatggattctattagcagattcttcatcaagttcttttaacttattatgcatgtaatctattcccttttcagcaagctgtttttgaagttcttctcttaattcattattggcatcagattgtgcaaaatccatattatatattaaagagtttaaataaagtcctgtgcctccagttactaaaacacattttcccttttcatttatttcatgtatatatttttttgctctttgttgaaactctgaaactgaaaatggatagtcaggcttaacttcatctataaggtaatgcttcactccttgcatttcttcctctgtaacttttgcacttccaatatccatatattcatatatttgcatagaatcagctgaaattatctctgcatctatatcttttgctaattttattgacaaatctgtttttccaacagcagttggacctgtaagtattataagtggtatttttttcataacattcctttccatatattttaaatatccaaatattttacataattcttttaaacattttttctatttctgtcttagatatttcgaccattataggtcttccatgagggcatgtaaatggattctcacacttttctagctgttccaataaactttttatttcaatatcgtatattttatcatttgcttttatagcagacctacatgccatagatgcaaatctctctccttttaaatcataattacttgtaatttcttctatattatcaattatttgaagtataaatttctcagtttcaggtactccaaatatagtaggaacacatcttaccattatatgattattgccaaaaatttctagttcaaaaccaaatttcataaataactccaagttattttcaatttgaagcatatctacatttgatacttcaataaccactgggtctaaaagtatttgcatattgatatcttgtctatagaacttctccatatatctttcatatagtattctttcatgtgcagcatgttggtccaacaaatacatagaatcgtctttgctcaaaattatataagtattaaatacaactccaattacagaatatccatataaggaaaacttgcgttttgaactacacaagtattcttcttcactgtccttaatactatctcctaagtaataatttccttcatttttaattccatcaacttgaaactcttcttgtatattatcatttgcactatcttcacttagataattaatgttttttacatcatcttctacacttgcatttaggacttcacttactgattgaaattcatttattggtttttcacttgataaagtcacaacttcaatgacttcatccttatctttagtaatattactatttttaggagtagattctaataaatcattatttcttaatttataatctgtacttttttctctactgttaatagcgattctaggttgtgtttttttatcactataagtagcatattttccaataagatttgagtgtattaatttaacctttaaaaaatctctaagttctatatacacttcttgttctttttcaaatttaatttcaagtttattggggtgtatatttacatctatacatgatgggtctacttctatatttaagaagcacactgcatgtttacctattggaattatagacttataactttctgttattgcatctatgattattttactttttacaaatcttttatttatatagatatgttgtaagtttttatttgaacggtatatattgttattacctatatatccattcattttaaagtgattgcacttaaactctacatctattatattttccgttatttcttttccatatatacttctaatagtgtttacaagttttccatcccctggagtatttaacatctgtttattgttatttgtatatttaaattgaatgtttggattacctattgcaagtttatttatcaaatcacttatgtttatagtttctgcatgagtagattttaaaaatttctgtcttgctggtgtattaaagaaaatatcttttataatgatggtagttccattagtagaacctattggttcttttgatattatttttccgccttcaacatatattttagttcctattatttcatctttagttttagtcgtcatttctaattttgatacagctgaaatagatgccaatgcttctcctctaaaaccaagagagtataaatcatacaaatcatcaatttttttaattttactagtagcatgtctcaaaaatgatttttcaacttcacttgaaggtattcctattccattatctgtaatcttaattagactttttcctccatcaattatatctatggaaattttatttgcacctgcatcaatggagttttcaataagttcttttactacagaagaaggtctttctacaacttcacctgctgctatcttatttatagtcaaatcatctaggatgttaattatatttttcatttttacacctctaagattttatttcttttgcttttctttgaagattataaagagagtttatagcatctaatggagtcatatttaaaatatccagatttaaaatttcttctgatagtatatctctatttacactatcaaaagagatttgagttaaggctacttcttttacagaatcttcttgattaattttctctttatcatcattttgcttcattaaagcaacttcatcatttaatgctttaaatttagaatttaatttatcataatccttttttatatgtttgtagtcttttactataagttcatgttctatttttagagattcatatttattcttaaaattactttgatttaccttaactaattcttcgtccaaattactattaattatattattgttttctttatctccatttattgcaacactgttgtaaacatgatttttttccaagtctttaagtatatattttgctctttctatgacttcgtctggtaatttagctaatttagcaacatatattccataactcttgtctgctccctgaggaattatttttcttaaaaatattattccttccccatcttctttgactgctattgaataatttttaacctctttaaactcttcttctaaatcagtaagttcatgataatgtgttgcaaataatgtcttacatctaatatttttttgaatatattccactattgaccatgctaaacttatcccatcataggtactagttccacgacctatttcatctaatataactaaacttctctctgttgcattttttaatataagggatacttcattcatctctaccataaaagtagattgaccttgagataaatcgtcactagctccaactcttgtaaatattctatctaatattggaatatcagcagactctgctggtacaaatgagcctatatgtgccataagagctattatagcagtttgtctcatatatgttgatttacctgacatattaggaccagttattatgttaataatgttttctccacgatttaaataagtatcatttggaacgaaattctcctctcctactatattttcgacaacaggatgtctaccatttcttatatcaagtttattattttcatttattgctggttttacatagttatttatatgtgcaactgttgcaagggacacaaaaacatctatattagctatagtcttagccactttttgtattctatctatgtttttatatattgtatctcttatctctacaaatatctcgtattctaaagatttaatcttttcctctgcatgtagtatcttttcttctatttcctttaattctggagttatatatctttctgcattactaagtgtttgctttcttatatatgtctcatctagctttgcctgtttaaagttggcttttgttatttctatataatatccaaaaactttattaaatcctatttttaatgatttaactcctgttttttctctttccctgttttctatttcctttacaagaaaggctccattcttagaaatctctcttagttccttaagttcatcactaaaatctgatttaattatgtttccatcttttatggttatcgtaggttcttctagaatagcttcatctattaaattgtatatatcatctaatttatccatttctgaaacatactcttttaggatttttgcatttgataaatttatagtatcttttaaattaggtaacttttctatcgaattttttaagtgaattaactcttttggtgttactctctcaaatgctatctttccacatattctttctatatcgtatatatttttaagtatatcatttaggtcttctcttaatataaagtcatcttttatttcttctattacatctaatctattttcaattttagatttatttatcaaaggttcttctacatattttcttaaaagtctacctcccattgctgtagaagttttatcaagtacatgtaataatgaaccttttttcttattccctcttatagtttgagtaagttctaaattagttctagtaaacatatctaaaaccatatattctgatgaattgtatatatttatattattaatgttagatgttatttgtttttgagtattgtatatataattcagaagaattgataagcttgactttattagacctttatcatcaaactttagtttttgtagataaacatctggaaaatattcttttaatatatttatatccaaatagttatcactaaaactttcatttatgtatatattacttacagtagctatatctctaagcttttctataaagtctaaatcatttataattatttcagttggatggatttttgcaatttcttcaattaccttatcttcatttaaacatgttgcattagtttctcctgtacttatatcaacataagttagacctatattagtaccatccttatacaaagataataaataattattctttttattttcaagtaaatttccatctaaaactgtaccaggagtgatgactcttataacctctcttctaacaattccttttgctgtagatgggtcttccatttgttcacctattgctactttatatccattttcaactaattttgatatatatgaattggctgagtggaaaggaacaccacacataggagcacgttcttctaaaccacaagcttttcctgtcaatgctatttcaagagcttttgaagctactaatgcatcttcaaaaaacatttcataaaaatctccaagtctaaaaaacagtatacagtctttatatctattttttacttcaagatactgtttcatcataggagttaatttattcatatctatttgcattatcaaacctccttcttttctaattaaatattatatcatagtagatgattattattaacacaatatataaaattttgacatataactaaaaacaatccaaaatgtatactcacattttggattgctaagtttaatgcttattaaataaaaatatatatatttttacaataaagatattatttcttttttaagtttaatgatattttcaaggttatcttcatttaactttctactatctataacaaattctttctttactattgatggtttttttgaaataacataaattctgtttgatagcattatagcttcgtcaatatcatgagttataagaagtattgttgaatttacttttttcttaacatctaaaagccatttttgcatggatgttttagttaatgaatcaagtgccccaaaaggctcatctaaaagcattatgtcattagaatttataaaagttctcaagaagttagctctctgtctcattcctccagaaagttctgaaggatatttatcttcatatccgcttaatccaaacacctcaaaataaggttttaccattgacctagctttactctttttttctttttttaaaattagtggtagtgacacattatctattatagttttatatggcaagagtaaatctttttgatacatataactatatttaccatttatattcactttgccactatcataatctgtaagtttagttataatattaaaaatagtactttttccacatccacttggccctaatatagaaacaaactcaccttcataaacatcaatacttatatcttttaaaacttcaatatctttataagtttttgatacattttctatagatacttttacttttttattgtggtaaaaattcatttgtgtaagcatcacttgccttcatatccttatctattaatttatattcttttaagaatgatgtatagttgttccatacactatctttcatttctccccatcgtggtgcatcatctttgtacttgcttgctaaatattcttgactctttaaagctagtttttcatctacttcaggtgcatgttttactaaaatttttgctgattcttctggattttttattgcatattcataaccttttgttgtagcttttaagaattttttagcaagctctggattatctttaagcacagtttcattagaaattataagtggtgtataataatccaatctctcatctaaatcttttactggtataaagtttaagtcatatccaattaaatcagctttaactgcatcccaaccttcaaatatccatgcaaaatctacagttttcatagctgcaaagaaatcatcttgaccagtattaactatctttaacttattaaaatcagctccatttttcttcataactgctttaaaaacagcttcttctgatggagagccccaaccaccataagtttttccttcaaaatctttagctgttgttatattcttttcttttggtgatgcaaacccagaagtattatgttgtataacagttgctacagcttttattggaagtggatcttcactagtctttgcataagtaacttgttcttgatagcttataccaaagtcagcttttcctgttgctactaaagtttctgctccactttcaggtggttgtactatttcaacatccaaaccttcttctttatagtaacccttatcaagtgctacaaataatccagtatgatttgtatttggtgtccaatcaagcaccatagttacttttttagaagaagtatctttatcattgtttttgtctttattgttatttgaagaacatccagttattgttgccaatgtaaaaacacttactaaacctaatattcctaactttttaaaattcataattgcctccctcaaatacctttaatcaattaatctatgtcttataacaactttttttacagcctgtacaattcctacaaacattaaactaaatataactactaatatagtagatgcaaatactttatcaagtgcatatgcactttttgacctaagcatataaacaccaagtcctttcgttccacctagccattctgcaacagttgctgccattacagcatacgttgcagatattttaagtccagaaaaaaatttatccattgccataggaaatttaaggtgaatgaatgtattaactttatttgagtccatagtcttaaataaatttaaataatctttatcaatattctcaatgccatctacaaaacttattaatataggaaaaaaacaagtaagcattaccatcaatacttttggcattgttccaaatccaaaccatatcataaaaagtggtgctataattattgtaggtatcatctgtgtaaccaacataataggataaagacatttttttattattgatacaaaatccatcaatattccaattaccaatgatattataattgcgactataaaaccaagtattgcttctcctatagtaaccacagcatgcatggataaattttgataatctttaaaaaacacattaattatatctactggtgtgggtagtatatactgaggaacttctaaaactcctaccatagattgccaaagaataagtataaacaaaaatgttgctattggatatatactatctttgactttatctatgatttctaagtttttcatctatagtcagacctccagctttttcatctactctagctactgttatgactctttcacatccaagattaaaagggattttatgtaccttttttaataattcaaaaacttcatcaaaatcaccttcaacagtagtgctcattgctcctatttcacatttaagaccacttttttcaatttcagcaatacaagcatctactactttatacatttcttcttcacctttgtaaggtcttagtggcattactgctatgtctgcgattaccatttaaatcactcctttaaaaataattaatacctactaggtatattttgttttttattaaaaaattttattactaaaaagatattatatttaaataaaagaaaagtcttatccaaaataggataagacttatttttatcttaactggtctccctacactggcattatccaaacaggttcaaagggtcgagataaaatctcctctcagcacattagctccccgaaatatattatatcttttctacttgattatactacacttatcatattttaacaaattttttatttatattagatattttatccgttcaaaaatatctaatatacattgtacattattacaccaaataaattatcttaaaatggtaatttatcaacatcttccaaaactagattaactgaattttctagtttttattttgctatttcaagcatatttggatgtatatcaattccatacaaatattgttctaaatttctgttttcactaatctaatttgcaatcgttacagattacagattagaaatagcttttagactctacttatctttatctacaaaaaatccttcaataaattcagtaataatattcagtaatctaaaaataaacctctatctggatttttaagatacaagccttttaggaagtatcttttgtgataatataaaaattactcgtcattatcatcaaaatcctcagcaaccaacattttagataagaatcaaactctataatataattattttatccaatttatttttgagaaataaaatatttttttaatttttaaattttttaatatgcaccttgaaaaaagaaacgttttcctatattatggtaatagtagaataaaactaaataggcaaaactagagaaatttagtgacgcaaagctatagggactaagacttatgaaatgagttatgtcagccagttgccaaagagatattttctttttgtttttatgaatgttttttagggggatatatgatatatgtttatggataaaatggatagatgtacacatatactaactgcatatatatgcagttcacgcgattactgcaattttatagatacacaattaaatgattttatactagaatatggagagaatgtggtagaatcttgtttgcatcaagtgatggtattggtaagcagatataattaaagaaattttattttctagaaaaccctttttagttttatctacgttttataattcattaaagaactaatcaaaataagcttcattatatatttttcatgaagtaaacagttgagtttatctcatatactgtttaccccaattacataattctaataatatagattccaatgatttaccacgtttagtagacaaatattcaacttttggaggaatagtcggataagaaattctcttaataagtccatctctttcaagatactttaattcttgtgacagtatcttatgacttatatgaacaacatctttttttaattgactgtaacgtattggctcttgttttaaaatatgccataaaataattgccctccatttacttcctatcacagtcatggtaaaaccaattgaacaattaaaatctttttgtctttcttcaatatttggaaattcttcaaaattattatctatatccatctcaatcctctctttcaaaatagtaagtatctaactaaaaagtgcattcttgtttagcgtactaattcgtaatataatcttgattaaaaaatagctacgcacactcgtgactttagtcatgagttagtagctaaaatagtcaacatatagggaaacctatatgtagagataggatagaacctatccaatactacttgaattgctaaaaacccctaaagctaaccaaactaaaacataaggatgaaataaacctaagtgtgaaagttacgaaagtagaaaaaattggttagatggtataaggttaaaccctaagtactttaaaatgggtaatcagcaggtaaactccgaataggagaaacttcaacgactattcctcttgagggaagtacactacaagttatcggtagtggaagtgggtagaccttaacggataatgccgaaggataagatatagtctgtgcttatgtgaaagtgtaagaagttcataagagaactgcataggtagtagcgaacttatgtgaacgacagcctcaaaaatgataaaagttaagacttacggttcttatatatgttatttaaaattaaatataaaaccttctaaataattgttttaaataattacatttgttaatattatgataggtgattaataaattgttcaccacagtattatataatatattaaatattaaaatcattaaaaagtgtatcaaaaaacaattaaagtgaggtgatagcagtgaaaaaagcttataagtttagaatatatccaaataaaaaacaacaagagttaattaacaaaacttttggatgttgtagatttgtatataataaatatcttgctaaaagaatagatgtttataaaaacgataaagaaacttttacttataaacagtgtagttctgatttgaccaatttaaaaaaagaattaaattggcttaaagaacctgataaattttcactacaaaacgccttaaaagatttagaaaacgcatataataaattctttaaagaaaaagcaggatttcctaaatttaaatcaaagaaaactaatagattttcatataaaactaactttacaaatggaaatatcgtgtattgtggtcaacatataaaactacctaaacttggtatggttaagataagggataaacaagtacctaaagggagaatacttaatgctactatatctaaagaaccaagtggtagatattatgtatcattatgctgtactgatgtagatattgaagtatttgaaaatactaataatcagataggtttagatttaggaattaaagaattttgtatctcaagttgtggagactttatagaaaatcctaagtatcttaagaagtcattaaacaaacttgctaaattacaaagcgaattatcgagaaaaacaatcggtagtttaaatagaaacaaagcaagattaaaagttgcaagacttcaagaacatatagctaatcaaagaaaggattttctacaaaaactatctactaaattaataaaagagaatgatattatttgcatagaagatttacaagtaaagaatatgattaaaaatcataaactatctcgctcaatttcagatgtatcatggtcagaatttattcgtcaattagagtacaaggctaattggtatggtagaaaaattgtaaaggtaggtaaattctttgcaagttcacaaatatgcaataaatgtgggtataaaaacgaggaagtgaaggacttaagtataagagaatggatttgtcctagttgtaatgaaactcacgatagagatataaatgcaagtataaatatattaaaagaaggattaagactaataacaattcaaaataaataacgtatgtaagaaccgtaggaactacggggatagcctgtggagaattagtaagacatattttagtatgcaaaattctatgaagcaggaaccctgtgactttagtcatgggaggttcagtgtagcatagagccttacataatactacttttttagatgtatatttttaaattttaatatagacatatgttattttattaattttatttaaacagataataataaataataatttatctcaagttttctatgtagataaactaatctaatgtttagaaaggattatataatatgaataaaaaatttcgtctttatcaagttgactcatttacaaaagaaagattcacaggtaatccagctggtgtaattacaaatgctgatggcttatctgaatcacaaatgcaaaaaataacaagagaattaaataattcataaactgcttttattttcaataaattggctaaaaatcatcaagaaaattatgatgtacatatcagattttttacaccaactaatgaagttcctatatgtggtcatgctactattgctgcccattatgttagagcagtagaaaaccaattcaataacaaaacagtatttcaaaaaactggtgctggaatattaccagttgatattataaaaaaagataatgattatgaaataattatgacacaaggaaaaattgaagtatctccaccattacaacaaacctatcaaaaaagattacttaatgcatttggtattttaaatgaagatattcgtacagattgtcctattgccatatcatctacaggacattcaaaagttatgattggaataaaggaattatcaacattaaatagtttatctccaaatttatatgaattatcgaaaataagtcaagaaataaaatgtaatggatattatatttttacattacataataaagaaactctacaagttcatggaagaatgtttgctcctgcaattggtatttcagaagaccctgttacaggaaatgctaatggacctttaggtgcgtaccttgtacattataaagtaatacctatacccaacacagagtttatatttgaagcagttcaaggagaagcaataaaacgcaaaggcaagatgttagtaaaagtaattatttcagataataagccagttgaagtaaaaataattggaaaagctgtaattgcattctcaacaaacatagaaatcgaattatagattctttctaagtaaatttttgaactttttaatactaatttaataacaaactaatttatatacaatcaaattaatttttttattatttgttaatatatatttatcattatattatataataatatagatagttactatatcttataattagataaatcataattatatattattgttaaaactcaattatataatttttaataatattattttaggaggtaaaaatgataaacgatattaaaaataaattcaaaaattacaaaccatatataaatggatacaagaatatgaagagagcatctgttttaattccaataatagaaataaataacacacactatatattatttgaagttcgctcaaaaaatttgaagcatcaacctagcgaaatttcttttccaggtggtaaaatagaatcaggtgagactccatatgaagctgttattagagaaacttgtgaggaacttggaacttttagtgacaatatagaagtaatatcaagtcttgacctccttataacaccagtaaagtttatcatacatccatacttaggatatataaaaaatattaataatttaaatataaacaaggatgaagttgaccatacttttttggttcctataaaatatcttttagagaatcctccaaatacttatagtaatactgtaaaagtttttccagatgaaaatctaccatatggttcaattccaaaccaaaaagattataaatttgaaagtggaagttatcctattctgttttataaatataaagattatgtaatttggggaatgacagcaaaaatactagaaaactttttaaattttttatcagaataacactcataataaatcatcaaaacttttacataagaaatttataaaagtttctaaatttaacaattctaaaatatcaataactatattttgtagcacttttttattttattattgtttgaatatttgatggttttcaatgcaatttcaacataaatactatgtattagtgtatactgttgatgaattaaagtatgataatctatttaataaagtatgaagtaaatgattttaatgtgtctttatggtaaaattactaataagtaataaaattaattaaaatatatggaggtgcttataatgtttgctgtaggatttgttgttataattgcacttgcctttttcattttaagtgtactattatttaatggaaaagccagtatgctactagcaggttataactctatgagtaagaaagaaaaagcacgatacgataaaaaaaaattatgtagaagttctagcattgttacttttattgtctctataatgctatttattatggcatttttgggatatagaatagagagtggtcaaatggacgaaaaaaaaatggttcccttttctataatatttataatagtcatactttccagtgtattttttaatatcctctactctaacaaaaaatgtaaaaaataaatagttgtaagttgagcagttaattataaaagattgactgctttttcatgtatattgactactcttattaaatattttaacatttaaaaatctatgtaaaaataatgaatatagtacaaacttctaataatgattttacctttgtggttacagtccactatatataatttaatatgataacatggaattactaatgacaactaagtaagcttttataaaatataataaaacaaaaatagatgtacaatgaaattatatcttatatcaaatttatttttattaatagcaaaaacttacattagcataacatatgacaaattcgcttaaaataaaaatttttaatataatttgttctatagtacatctatttcgattagtttacataattttattattttgtacaatattaattatttactaatatcccatttaatgaaaaagttctaggttcagtaattttgaccataactaatttaccaattaaatcatcatttccaccttcgaaatttacgagtttattttgtctagttctaccagcaaacttattttcattatttttacttcttccttcaactagaacttcaactattctatctttatatccatcatttatttctgcagaaatcctatttacagcttctaacaccctattaaatctatcatgctttatatcttctggtatttgattttccattttagcagcaggagttccctgtcttttagaataaataaatgtaaaagctgaatcatatctaactttttcaaccacatctaaagtgtccaataaatcttcttctgtttctcctgggaaaccaatcattaagtctgtagaaaaagcaatacctggaacttcctttttagctttttctattatttctaaataatattcctttgtataatgtctattcatttttttcaaaaggctactgcttccacattgtattggtagatgtaaaaactcacacaccttatcacaatctctaattgcgtatattacttcatcagatatatcttttggatgagatgtcataaatcgaaccctttcaattccttctatatcattcacttttcttaaaagttctgagaatgaaactggattttcaagtgtcttaccataagaatctacattttgtccaagtaaagtgatttctttcgttccatttgcaacaagctcttttatctcgttaattatatcttcaggagttctacttctttctcttcctcttgtgtatgggactatacaatatgtgcagaaattattgcatccatacattatatttacaaatgcttttaattcaaattttctattacttctaagaccttctattacttctccatccacatcccatacatccactaacattttgtcagaatttattgattctgtaagtaattgcggaaatttatatagattatgtgttccaaatataaggtctacatgtttatatttttttcttaattcctctacaacatgtggttgttgcatcatacatccacatacagctattttcatatctggattttttccttttagatgttttaattgtcctaagttaccatacacttttagctctgcattttctctaactgcacaggtgttatatattattaaatcactttcttcaaccatcattgacatttggtatcccatctcttctaacatcgaacataatttttctgaatcatgttcattcatttgacacccaaaggtttgagtaaacacgagttttctctttccagttctgttgaagtattcttcattttgtctgtgtatttgttctatatatttatcttgttcttgtattttctctataggtattgttacttgttttcttttgctcacgtctattcctcctagttaatttcttatattacacataaccttaattatatcaaataagaaaaatcttttaaagatattattatttttctagttgtgttttaatagtaaatctaatgatttatatatactatatttctaaaatataaaatcatataattattataataataaaaagatgttttaaattaaaacttaaaacatctttccttaaataaaatatatgatttactattaaatacaattacatctattcattttcaattaaataacaatcatttaatattaaatattgaccttcctcaaccgttatatatcttcttcctgaaaaagtatcattagtaactattccctctgcattacctaagctatcatttctaacttcataatatgcatcagaagaatttgacattataatatattctccagcaggaatttctaatccaattttatacataccatttccaaacttaccattcttggccttctgggctttagcatactttgctaatgtcattgttgaatcctcaattttaatatattgaccattctttaaggtgatatatctagtcccactaaaaatatcatttgaaagtatactatcagcattacctgtactatcacttgtaacttcataataagaagcataacttcctgagtttgaagtaattaagtattcacctgctgatatatcttttccaaccttatacattccatcttttatagtctttgtagtaggtttaacattttttacaaccccagtattaatatctccaattccatttgttatatttaaacactgttgtactatatttgaatctatatatcctatagaagttatcttcttagcattttttaaaatgcttttattgctaccatcattaactaaaactattggaccatgttttgataaagaagatcctacaagtgcatttgttaattcataagctccagctatataaaactctctagcatccttataaaacttatttattattgctttattagtttcaaaacgagtactccctcctagtctagtagatttagtattgtttactaaagtggtactcattgaagctgttcctcctattacataagactttaaaccactagttgaaaaaggtatactttgtccattagtaagaattattggtgctttatctcttgctgctacagatgcaatacttatagcatctgcttctcctttatatgcattggttagcataacagtattgactttttttattgaatttatttcttttgcaacattataacttgtttttattctgtcatttcccttaattcttacaactttcattttcttagattttaatgaattttcgacagatgtactaatagaatatgttcctccaattatataaacttttgatacattttttaatcttgcagatgtctcagttggtatagtatttttttcagttaatagtataggggcatttaaagctcctgctagtccacttgcacttaatccatctgcaatagagttactagtattaattaatatagcagttttatatgcatttttatctgctattttgcctgctatttcatacttattttttccttgtattttttctacagatgatattgcatctactaattgaatatttgcaaatacaaaagaaatacttaaagtcaatgttaatattcttttatagaatttcataataaaattgtccccctcataataaatttttaatatataaatacatattcttaaattagttatgtacttaacaaacttatgtaaaattgcaaattatattaagcatattacaaataaatattaatacaattattcatttagctataattgtatttacatttatattaaaaatcaactagatttgtataaatacttataattatatttttattcttaatattttttttattatgttattttaatagatttatttttcttttttaagcatagagatgtatttttccatatattctatttctattatagtttcgcttatttaattcacccaaaatttcacttaatattagaattttaaatcttttactaaaacagacttttatagttctattaaaattttttactaaactttattttatactatgaattatctattttttttgctaaatttaagcaagttttccacaaaaaatatatacattactatatttttaaaactctataaatatataattgatttaattggaaattttagtgtattcaaaaaatgagaaatcagaggagattaatataaaaatttatcttgaaaagtcaattaaatatatcttatatttaataactacaaatgagatacatataagaatattatataggtatgataatttatctgttaaattaagtgtaattggtactatataaatattttattaaaaataaatatataataccaaatctttaaacaacataagaataaaatagttataatctactttattcttatgttatttagttattataatgctttataaagtaaaatattatttcgtagttaagcttgataactaactcttcttattgatagactaacaatcttgaataaaaatattcctgcaactagatttattaaaacagctggtaatactactgctaagaataaagctgtaaatgaagctcctggaagaccaactatagcttgagctgctaataaaaagatagttccacttacaagagttcctattggcattattattgcaactactacagtatcttgtgttttcttagctaatttttttataaaaggcatattataactaatattcattaataaaaatactatatttgctgtaagagttttatctattacattaggaatttgacctcccggaaaacttgatgtaagtgctgtaaatattcctgttactatacccgctatcaaacaagttttataatcatctctatttaaaaccaatattacaaataacattgctagtggtacatctggcttcattggtaatcctatagctggtgtgatttgatgtattaataatcccatcgctaaaagtattgcatttaaagttaatttttttgtatttgttttcattttttgtacttcctcctatttttttaattttcaatttatttttttgccaacctactatatcatcatctttagcttttgaaattcataacatctttctcaccaccttctatcttttaaattttcagtaaaataaaaaactccgtcctaaactaataggacggagattatccgcgttgccacctaaattatataaaaattaatataaaattcaattttcatacatctcattatcaggtacttacataccttattcgctataacgtgcgactgacgataaagtctactctcaaaactatgatttcaatttattcctctaagggccattcatcaaattttttcttgctaagattccaccatcctcagctctctatactgaacctaaatttaactactcttccttgtcataggatttaatttattgtattgaattttgttgttaaaataatgatattcttttttctaaaaaatgtcaatacctttttataaaaaatatattttgtaatctattttttataaaaaaagtaaattatactatacatttcttttcatatacaaaattctatgaataattactttaatggtctaatagtctgctctttggctctaattcttcttatattaattttgtgaataactgttgatgtaattttatattttgattcatgaggaattaaattcttcaaagttaattaagtacatttatcaataaatttacttaattaaccatcatttaatactcattcctgtatttatatgcctcctttgaaacagaatattactccattttaattacatcatattattaaatagataccaatgattagaaaaatgatattcttttaattatttttagtaaaattttttcttctttcttttaataaatattagcactactaaaactataaccaaaaatatgactattatggacaatactaattttgttaggatattatgtcttcttgcatttcgtcttttatatttatttatagtttgatatccatactttttagttcttatacttcgttttttcaactttactttacttttattatatttcctacttttatgtctacttttagatttaatagttttaaatttagtattatcatatgtataattctcttttattgaagaaatgtatacactagactcaataatagcttctgcttctacttgtaatggatttataatactgattataagtagaaaagatatagctatcccaatcaattttttcttcttattcatattttccccctcataaaaatttttaactagttcattataatatatatataactaaaaattacaaattttttcaagtttcttatatatcttattatctttaatattatttttattatcataacttttactttttttaaaatttttcaaagtagtattaatttatgatacttggtgtataaagtataagttaaatctactttcaattaaatttaccatttataattactttataataaaaataaattagttaatttattctctttagttctgttataatgtttctacaaaaaagaatcccattaatgggattcttttttgtgatttattaacatatttaaagctcactagtatcgtattataaacttaaatgctcttctatgtattgattatatacatatccagaatatcgtttttcatttttattgatattaactcttgcccattttccaacgctataacatacttcaactttaaaaccatcagggattgtagttataactttagattctaatgttctatcatttctaagttctaaacttaatccatttgttcttatatttcctatgtaattcttttttctattttttattgtatcattactattgtttttagcattacttaatctttctaaatatttataaagtaaccagcctttgtcataattactctcaacttctgcccatattccatctacacattttaacttaacaattttaccttctggtatactttttaatttcaaactatttatgtctggtttttctcttaaattcaatttaattttagttttaaaattgatgctagatttgccaaaattttttaacattaattcagatatcatcttaagccctcctcttgccaaatattaagttattaaaatatataactctaaaaatacttttaacaaaaagaattattatctttttggcaactggctgacatgacctttattacataaagattttagtccctatagttttgcgtcattagatttatctaatattgcctatatctgaataataacataatttgaacaattaaaaaataatattacctcaaattttatattatttaaatataaattaaatttttaattaataataatcaaaaaatatctttatatttattcaattactgttctttatagtcaatataaaagacagtaatttatctatagtgttacttatattttatatatatggctatttttcaacattttacaatatatataacatttatttttttaacttttgtcagtaaaatgtcagcaagacactttatccacaatttttatataagttttccacaacttatccccagtattatccacataaaaaaggtagctcttatattattagctaccttttatttattaatcttcatatttccagctttttatccaacttcctatttctattattttttcttcagttatttcttctccatcatgtaattttgaaattaattctgataaaggattgttatgtaaacctctaaaaactctttttccctctattttgagatattctctctcttttattaatactgtatagtgtacatgcctcccaattctctatgatattaaaaaaccttttttggttaatctagctaaaagtataattgtagttgtatgcttccaaccatatgttttttctatttcatctgcaacatcttttgatattacagttttataaccagtattccatatgcatttcataatttttaattctgtatctggtaattttttatttagcataatatattccttctttcaatttatgtcacttcttcaaatttatctagcttaaattataataggagttttttagaacaaaaactatagttaatttttaccaggtactctacgtgtttagtctgttttttaagtgtaaaataatgttcatatctataaatttatttaactttcaaacaatcctgttgaataataactaattctattgtattattttagttgtagaataaaactaaatcggcaaaactagagaaatttagtgacgcaaagctatagggactaagacttatataaatatcttatgagttatgtcagccagttgccaaagagatagtgttctttttgtttttatgaaagttttttagggggataataatttatatgtttggaaataaaatggataaatgtacacatgtattgactgcttatattagcggttcgtatgattattgtaattttttagatacacaattagatgattttatattagagtacggagaaagtgtagtagagtcttgtttgcaccaagtgatggtattggtaagtaagtataattagatagacattgatttctagagaaccctttttagttttatctacatttatattaatatatagcaatgtaaaacgcttaaatatatttttaatattaagaataactaaaatgttgactaaaaaatataattaagtagacatttctattaatctatgatacaatagtatttgtggtaatacacaattaaatcaagtatatcttgatataggttaataggagtatttttaatgaataatggaatagtgaaatggtttaataatgaaaaaggattcggttttatatcaatggaaggtagagatgatgtgtttgctcatttctcagctatacaaacttcaggatttaaatcattagaagaaggtcaacaagtaagctttgatatagttaaaggtgctagaggtcctcaagcagaaaatataactatattataatatatagatttttcgggaaagactctttttagagtctttttttattgttagtatatgtaagataatcattggtgaagtaaataaggtatattgagtaatgttcttgatagtttatatgctaatgaatttcaaaaaaataagcactcctataaaaagagtgctcttaatgtaaatataagccttcattggtccagcctaataccccgtattctccaagttctaactcttttttatatacattaccactttcagccatatctaacacaatcatttcttctttagaatcaatttgtaaaatatgaggactgtgtgttgtgacaattatttgtgtttttaggagaattgcttttaatgtaataaaaagtttacatacaacatagttaatataaaacaaaattatttttgagaatgagctaaataaaatcttaactttacataccacatagttgatataaaaccccaaaataaacttagcatctccaatgtttacacatatacaatgctcttaaaattgcagtgaacatgcaatagtgcaattgataatacttatcatatattctcaataccttatatttcaactgctaaacctcaatttgtcacaaatatcgctcactgcaaaatttctatatttttattatatcatagcatataattaatattttcaattaatttttacatttaattatgtttaaattctataataatgcaactttaatgtttctttctggaactaatataaaaactatttcagaaagattaggtcatgcagatataaaaataactatgaatagctactctcagtttttagaagagatggacagagaagcatttgaaaatttgagcaaaatactatttattgtattttaaagaagatgacttattcaatatttgatgctagaatataattaataaaaatttaattataggtgattgtattatgaacattattaaaagcataactttactcttaacattattaattgtgatattaatgacaggatgttccccaagagaaagtgctagtgaagttgcaaaaaaatatattgataagatgaactctggtgactatgaaacagcatatagtttattaagtaaagatagtaaaaaaaaaattagtatagaaaatcttgaagaatttcaaaatattttagttagtacaaaaagaataattagttataaaataggtaaagaaaaaatcataaaaaaatataaacatgatggaaaagaatataaaaatgttgttaaattagaagaaacttttaatataaaaaaccttctttataaaaaagatgattctctaaaagtaaatagatattttgtagttgaaaataacaaatacaagctattattgtatgaaagtttcaaaaaagaatttggtattaatagtatggaccttgctcaacttaagcttaatgattttggactaaaatactttaaagaagttgaccttatactaaaaaaagctattgctattaatcctactgattcaaagctttattatgcccaagcatgtaattatatgaattttgatggatttcctggttattcagatacaacatataatgctttagattcaattaataattctttaaagtatttagataaaaatgattctgactacaaaaaaaatgcaagtaatatatataacttaaaaggagttattcttatgtttcacaaaagatttgatgaagcacaacaatatttaaataaagccttatactttaacaaagataatgaagacccaaaatataatctaaatacaataaaaaaacatctaaactagatatttaatttttgaatttataaaatatttttttatgtataattcagcactgaatcataatctctactaaactaattacaagtttaaattataaagacttatttctatataaatattactctataacaataagtttcttatttaaattttaaaatattatctaaaaatcataaaaaagaaggtataaagagctaccctcaagctcaatataccttataaatatctaaacttcattttttactaatttttctatatctttgataatatgttctttagatttttttccagctatggcatcaaaaattgcaacagcctttttctctccaaacttttctgctacatcattaaagtctaaaaatctaacactttcttttggtttaccaaacatataacacctctcatacatttttatatatttattataacttctatagacttatttttcaccaataaacgttagacaaattagtccctttatttttttaaactagctttaccttcaaaattcttaacaaaaacagtttattctactctataaataaaaatagacaatttaatttgtaggaaactgataatagaatacagtaaataaaactttgtttaatctatctgaaaaagttatctattaaaactgctatgaatttataaagaatattctagttcataaaaatacaaatatgtaaatataatcaccttaatattcaatttatttaaaataaaaaatgtataaaagatttaataatgacaatatactattctcaatacaatctatgatgtaaataatttaaaactactatattatttaaaaatttatatttatatatgcaattctaaaaacttaataagaagtgaacttagaaaataaagcttaatttcaaagacttaaatagaatattattattagtctaaataaactacgtgtatcaaaattatatattaaattcttctaaaatttttattgcaaatcttgcgtttggatatgtaatagacccgccaccaattacacctatttttatagcttctataatttcatctttacttgctccagaattaatacaaccctcaatatgataacaaatacactcatcacatcggcttaaaattgaaatagctagtcccattaattccttattttttttacttatagccccttctgaataagtcttatcatcaagacttccaaatactctaaaaaactcatctgtttcacttaattttttattgtaaaatcccctatattctttcatttctctagtattcatcttctacctcctatgtttttcttataagagtatcacactgtacttatattttcaatattaaatacaaattttcattttatgttcattagcctaatttatattattttttgaaatctcaataagttatcatataagtaagattttttcagaactaaaatagaaatcttagtaatttctttattatctatctcagttctgaaatatattattcttatccaaacattattatagtgattaattatattagttatttttacctgaaattttatacatcaaataagaatatataaatggtagtattacaattacaaagattacaaagatattataaaaaggaatattaataaatgcattaataattaataatattccaccaataagccaaatccatccagctaaatggtgtgtcttattccaattatcttcatcatcaagagtccatggcaaaattattcctactgagtaattttgtttacatttaggaagatagtttccaaataaaataactattattcctaaaattaatcctgtataaaaattagactccaaactaactcctgttgaatataaaaccatcagtatttgtagaattactgaaagtatagcaactccccattttgataaattttgtataacatttgaaaaattagcttttttaggctcattctcaagtctaaaccatgtatacaaatggatacatagcattaacaatggtacaccaaaagctgctataacctttggagcataattatctggatttccataattatcaaaatgaattgcaacttcatttggtaatctattataaaaatatattgatacaataaatggtataaaacatattaaagtagataaaataaattgtttatttatcgcttttttcattatctttttctcccttctccataaattgtgaaaaccaaagcataacctcttcgaaaactgaaatatttatttcgtagaaaataaagttcttatactttgtttcaaatatgagtcctgccttttttagttgagatagatgataagaaattgtagcattcgtcatattaaatttttcactaatttctcctgctgacattttattctccctcaacataaccaatatttctcttcttatagggtctgaaagagctttgaatgtttctggaaaccccaacaccatcacctcgctatttagaatttcatctaaatagaatataacataacatccattttatttcaataactatttagaaaaatttctaaatagttatttccaaatatttattgaaaattttcatattaagattctcaatttacttaagtcgcttttatataatcttattttatctaatttttttaatttaacaaaagtgtattgcaccacaattgttaaagcaaaaacctaatgactgatatacttatatatattacatatacttttaatttcaaattaaaagtagctaaatccaatttaaaaagtagttaagtcctatttaaatagaaaagaatgaaataagaaatatactgtataaaaatgcataaaaacctctactaattagatacaactataatagaatatatttattattataataacaaaagaattaaaaaaattaatttagcataaccttgttaaatatagatttgaatatgaatttaaagttatgtaaaattaaaaatacaggaatgaaaattccattcctgtataaaatctaacttttgagtctcaatacaatcttattttgagacaatcttttttgttttatattttcttatatttaaaatataacgcatatcttatgcaacatattcatatttttctttatattctttcatcgcatcattccaagcgtcttgtactgttacacctcttttattagcaattttttgtgccagttcaattatcttcatagctcttcttgatatgttcataaacattcctcctacaaattaccatatatttcatatatataaatcaaggttatatttttatgatatataatccttctattgtaatattacaatttatatgtgtattatatatgaactatattagaagataattagaatttttataaagctatatgattagattaaatataaaagctttacaattacttataaatttaaaaagtctataaactaaactaatgtttgatataccaattttacgaccataaataatgccattactaaaaatattggttttatcatctttgaacctttctttatagcaactttagcacctacataagctcccattatcatcactaatgcaaacactatagcaattttataatctacttgaccatttatcatgaataataacaatgaagttatattacttgttaagtttaatatttttgtatttgcagaagcatgtaaaaaatcatatccatatatttttataaatccaaaagtcaaaaaagttcctgtacctggaccaaaaaaaccatcataaaaacccattataagagccataagcatccctagtcttaaatttttcttattaacagcttcaaaattatcttcttgacctaaatttttagaaataaaggtgtaaatagccactattaaaatcataaccacaaccaaaacatttaatatctcttcacttattgataatacacatctcacacctagaacactaccaataatagtaaatggtactaatttttttaaaagatcgttattaatttttccagactttgcatatctataggcactacttatacatcctgctgatgctgcaaatttatttgtaccaatggcaagatgtactggcactccaattgccataagaacaggcatgcttataagtccctcctcctcctgctatagaatctacaaaagcagctaaaaacccccctatacataaaaaaataactgaaaacataaaattcctccatcattctctttcaatttttcttacaatatatattatataatcttatttaatacttattatccagcatattctttctatattcatttggagttatactattaaacttcttaaatatttgtgaaaaataactactgttattaaaacctactttcttacaaatatcactaatactcatgcttctatctaacagatattttttagattcttctatcctaagaagatttatatactcagttattgaaactttatttctttcattaaaaatagaactcaaataatttggacttataaaaaaaacatctgatatactattcaaatttatattttctttataatatttttttatatattcgtttatattttcaattagatttcctttatcttttctccaaaatgctctattcttatcaatacactctttggaaaattcaaataatacattccataaatcttcatcactgtctacaagtgatatttttttattatatttatttcttaaataagatataagttttaaatcctctaaatctctaagcactgttctagacaatacaaatatcatttcctgaatagtatctctaacatcattatatcttaatttgtttgtatctattagattataaacaccttctaaattcatatttttaatttctttttcaatataaagttctaattcaaagggatattcttttgaagaattattgaacatatctatcggattaataatatactcttcttctaataatctactatttgcttttttaagtgcctcttcaagtcttatattttcttttctactctttaatatctcctcatcttttatactaagttgattttcaaaaaaattcctcttagctatttcctgaataaattcagacatcattaataaattttcttttaatacatataatctacttttaggatttaatggaaattcattgtaaattttgtttatgtattttatatcaataccagaactacttgataattcagataaatttttatctatatcaatagacttatatactataaaattaccacattctatatatccaactatattttcttctaatactataggtatctctaaactggaaacaccatactcacaatggtacactttttcaaagttatcattatttatgcttttaacaagttttttagtacacggttttatatttttacaaatatcgcaaaatttattttctttcttagtctcaaatattcctttatactttaagtcatatacagatattctaagcttcaatatattagatatttgatttgcaagattttcaattatgtttacattaactaactcttgtatattgttttcagaaaatactataggtatttgtctcaaactcgaaaatttatgaggaacataagtaattaatattactaaatcaattttaccagtgtttataatttcatgttctgaatatggtgggcaataaactatagatgtttcctttatattgacctttttaccatcaatcatttgtattccttctccctgaatcacatataaaagctgttcttcacttaaatgaaaatgcttttcttggcagtttcccggaaaaaatcttacaattccagcactaagtctattgaattgtgtttttgatggttcgtgtatccacataacctctccccaatcaaatttttgtacttcattatttgactcaataaaatccaccataaactcacctcgtagtttttatctaaatatttttttattcctttaaatatctccttataatatacattatcataattttcttttttattgtatagataaatagttatatagaacattgtccaattcttcctaaaaatatagtgtaaaaaatctttcctcaaatgtttccaattgaatttactctttatattagaaaaatcaaaaaattatttctttattctataaggattattttttacacatctttttttcttttaagtaatatattttctcatctattttatccatacaactttctagttcatgtattttatttttaatgttttgcttatgttgttgaaataattggattcttttatctattgtaccatctcccatatcacaaaaatgaaagcattcatggatatctttaatagataaaccagtattttttaattctttgataaatattagacgctctacatcttcttcagagaaatagcgaacaccacttggttttctattgataggaagtaataaacctttttcttcataaaatcgaatagcagatgaagaaatttttgttatttttgatacatcagttatagaatatttcataatctctacctccctaaattttatatgaataagaatattataaaaataccttatacagtagtcaacaaaaaagtattgacttcaagttaggttgaagttgtactctttgaagtgtaaaagaaaacttacaaaagaaaggatgatataaatggaaaaatatgcaactatgattaaagaaaagctaaatgaaggaaaggtcttatgtggagtagctgtttcactgtctgattcagttgtaagtgagttaatcggtatatctggatatgattttatttggattgaaggagaacatagtgctttagaccgtaaagacattcagcaacatatgatagctgcccatgctggtggtgctgcttctttggtacgattagtaaacagtgaccctgaccttgttaagcccataatggatatgggaacagatattatttgtttcccatttattaatacagtagaagatgcacaaaaagccgtagcagcttgtacttatcctccaaacggtataagaggatataatcctcaaagagcctcttattatgggaatatgaattattttgactatgtcaaaaacgcaaacaatgaaacattaaaaatgatgttaattgaacagaaagcaggttatgataatcttgaagaaatagtaaaagtcgagggtattgatattatagcattaggccctggtgacttatctttagacatgggtttttccggatatatgaatagaattgaaataaaagatatgatttctcatgctgctgaaatatgcaaaaaatataagatgccctttattatttttcctacaatagaaaagaaaagtattgaagaatgggttaatattggagcaaatatgctttgttttgcacaagatactacctttatcacttatgttatcaatcaattattatctttttataatgagattgtaccaattcaaaaacaacattaaattataaatctaattttatattaaaagagactaatattttatctatctctattaaggatattttcttatgtatcataatattagtctctcttattattatatactgctatcatcattagttgctatttatactatttttataatatacaaatttattcagctaacgttttgcctaattctatacactcatcttttgcttcttcatttgggtcttccattgctgtaattccttctccaccaataattgtagcaccagcattttgcatacgttcttcccagtctctcatccattcacaatttccccatccatatgaaccaaataatccaatctgtttacctgataccatagattctaattctgaaacaaatggctccatatacccctcttctagttgctctgctcccatagatgggcaacctaatgcaaatttatcttcttcttttaaatcacttggtttcagtaagctcacatctaaaacttctggtgtcttaccttttaacttcacaccttcagccacaaaatttgccattttttcagtatttcctgttccactccaataaacaatatatattttactcatttttacctcctgtagtattttttaattaatcaatagttagttatagctaactaacatctaaaaaacaaaagatttctttatctgaaatctctttatttttctaaatatagaatatcacaattgattttgaaattcaatatttattgataatatttatcatttatattttatattcattttataatatcaaaacactgtatcgtatttctaatctttcatagaaaaatttctaacttatagtacttttgcatctcttataaatcttttatatgtataagtacatagaaaaacacaccttttccagatgtgctatctataatatcgtatatttatttttcaattctaactagctaatatgtttataaattttatcacttaatacctttatacattgatgtaaaatcttacacctaagtaatttttattatttgtctcgactctatataatatagctattttatcatcaaatcaaaaattatcttttgctattattcttgtatttataaagatttaaatataagtatccatttccttgttccgttctaggtattccaagcgctctcgtacattttattaattgtgcatacagttcagcttcatctaaatctctttcaaactcctctcttgcccattctttaattagtgctaatgagcctgatacgtatggtgcactcatactagtaccactcataatagcaagtttattatccatataagtcgatataatatttcttcctggagccaccaaatctattgtagtatttgaattactaaacttttcaaccaaatagttttcatttattgcacctacttctattacctcagcataactggctggataactatactcacttgtactagaatcaccatctccattattacctgctgcacacactacagaaatattattttttactgcttgcatgacagcattttttaaattcttatcatctttgtttcccccaagagacatagatataatatcaaccttgttatttacagcaaagttaatagcattaattatactttgatatgttccggtaccatctttatttaatgcttttgctattaataatttacaatctggagctactcccataacttcattattatagttagatgcagctataatacccgccacatgagttccatggccattaaaatcctcatatatatttttatttccattactgtcatcactaaaatttgcaccaccaattatttttccttttaaaagaggatgagatatatcacaacctgtatctattataccaactacaatatttttaccagtataaccttcatcccacattcccctagcattcatttgttttattccatatgggaatttattttttgcacctcttagattttcatttatttcatacggaattagtttcattcttttattcatcatatatcctcctaaaaattttattgcttataaaaatcatgaattttattttataataggtttataaatcaaattaaaacctatatctacttatttatatttatgatatattttttatttttaggagtcatatttttttgtatataaaataatatttagataactatattaaaaaatacatgtttgcttatatacaaaacttactaaaatatctttaatatttttgtatacaaacagtatatttttcatacaaaataaaaaggatacctcattagtgctataacacctaagatatccaattaatattttcttaattttttctaattttcgtaaatatagttcactattttaaaactgctcctgtatttgctgatgttaccaatttagcatatctacttaagtatccatgctttattttcggttctaaaggtttaaattttaattttctattttctatttcaacttcatctacttttaactctaattttttgtctggtatgtttatagaaattatatctccttcttcaactagtccgattaaaccaccttccatagcttctggagaaatatggcctatagatgctcctctagttgctcctgaaaaacgaccatcagtaagaagtgctacatgcttatcaagtcccattcctgcaactgctgatgtaggagatagcatttctttcattcctggaccaccctttggaccttcatatcttataactataacatcacctttgtttatttttttaccaaaaatagcatttacagcttcttcttctgaattaaaaactcttgctggtccttcatgaactaacatttcttctgcaactgctgacttttttacaacagctccatttagagcaagatttcctttcaatattgcaagcccaccttggttactatatggattctttaatgtatgtattacttcttcattttctatttcacaatttcttatattttcccctatagtcttgcctgttacggttttgcaatctaaatttattccatttatctttgaaagttcgttcattatagctggtattcctcctgccatatgtaaatcttcaatatgatgttttccacttggacttaattttgttaaacaaggagttttttcacttatttcatcaaaaaaatctaagttaaactctattcctgattcataagctattgcaggtaagtgaagtactgtatttgtagaaccagccattgccatatcaacagctatagcatttttaaaagcatctattgttaaaatatctctaggttttatgtcgttcttaagtaactccataacatacatacctgcatattttgctattctttttctttctccagaatgtgacgcagcagtaccattatatggtatacccatgcctaaagcttctgttaaacaattcatgctatttgctgtgaaaagtccagagcatgaaccacatccaggacaagagttcatggctaactcttctaattcttcttcacttactgttccatctttacatgctccaacaccctccattgcagagttaaaatcatatacttttccattttttttacctggaagcataggccctccactcacaacaatacttggtatattaagtcttgcagcagccattaacatacctggcactatcttgtcacaattaggtataagtaccaaagcatcaaaaccatgtgccatagccatagcttctattgaatctgctattaattctcttgaagccagggaataattcattccgacatgccccatagctataccatcacatacccctatagcaggaaattctaatggcaaaccaccactcattcttactccattttttgcagcttctgctatttcatcaagatgcagatgaccaggaatcacctcattttgtgcatttactatacctattaatggtctttcaatttcttctttagtaagacccattccatacattaacgctctctttggagctccttctattcctttttttatatcacttctcataatattacctctttcttacttttttaaattttcataatattattataatatatttttctattaattaattacgaaaattgtaaaaaaatattagcatatactaatgaaaatttattacgattttttatcaatatcttacacaatcgtattatataatattatcttttcaatatattttataaactaatatattttacaaattgttgagtaatattttatgatataaatcagaagaagcacttctataatagaaagtgctcaactatgaataagattaataatatatttgccttagatatatagacttttataaatattaaagattaatcaaatctgatgtttgaaactttatcccaattaatcttccttgaatagtcttctggatgtgataatctaactatatgagttgaattatcatagctgtaataaattgtagtagtaccatcaactggattctttttgtatccttgatatacagcactatttggtactttcttttcaacaaagctatatgcagatgaagtatcaatagtttctattttattaggaaatataaacatataaaaagctactactataaaaatacatatgcatgtaatactataccatttaatccatttcataaaattcctcctactttaccaaaatatactattattatttccatatatttataatatttatacatacgataaaatttttatatacctaactatataattgtagaaactttgattatatatattttttaatcttaataatatatttttataaattaataaatttttaagattttattaaaagatttttaaaacttacagtttaatataaagatagtacttataaaactaaaaacataaatttgaaaggggacaaaataaaatgatatggacattttattcatttatttgcgttatattaccatgcttaatataccaaatagtcgttataaaacgaaaaaatttgaaagttgaaaagaatgtaatgatacatttagtatgggtatatatttttttattatatatctatctagcacttagtaaagctggaattggtagcatatgggatataggaaggtatagtgggctttttagaattgatgaaataaatctaataccttttgactcagttggcatcttaacatatattttaaatataattatgtttatgcctttaggatttttactacctttaatttggaaaaattttagaaatattatcaatgtttcattaactggattaggtttttcattagcaattgaactttgtcaattgtttaacttaagagctacagatattgatgatttaatgatgaacacattaggtgctgttttaggatattttatatgggtaggtgtaaataatttatttaatcttataaagaaaaaagatattttcccatctatatataaaaatattattcaagatgaaattgctattacaattgatgatgacataagcaaaaaaattacctctctttacaaaaatgaagctattatatatttaatacttgctgttttaggagaatttttattgtttaattggtccattataccttattaaataatttattgataaaacaagtgtacttcgatatttacaaatatgtaaagccctctttcatactacaaaagaaagtgggctttagttattaaactaaaatgcacactcactatttagctggcatctgaaatattttattaacattgtatctgactttatttgatgttatataatcatattttgttccattttcaatgaagttttgtatattgtccaacacttgtatagctcttgtattattttcataatctcctatttttacagtatcaattttactttcaaatactgcataaacttgactaccatctattttaatttggtttatctgcattaaattagttttatcttgacttctaattattatcatatcaattcctccatttacttaattcattttaatttctaagaaataatattttataattgatttatagattatttaaatttttaaacttagtattttattttttaatacgattatttatataaattacatctctaataaaaaattctcttaaagaatacttttttgataatactttgttttatttgtagattgcatttttgaccattataactaaattaaataatctaatgtattaaagcataaaattatctatgctactgatttattttatacatttggtaattttacttgcaaaaaattttgtacatattgtttatatctcaattaagggttttcaaaactttctatatatttattaattaattcagtttcttatttcaacataccacctctcatcaaattaccatttgtataattcatattatacatatacaaatggtaattttcaatatattttattattttaaccctttttttttatatttttggtaattttattttactttttatcaaaataacttataatttcggtaaggagtgatgtacatatggaaagtttaggagatagaatagcaaatctacgaaaagaattagatataaatcaaaaagaacttgctactaaagtcggtataactgaggctagcttgtcacgttatgaaaataatttaagagaacctaaaagtgaaataatagttagattagcaaaagcattagaaacatcaacagattatttattaggcgtaaatgataatacaaaaataagcaaagaagataaattaatcatagagaacttatcagtaagtgaaaaaacaaaaaagctcttagaaaaaatatattctcttgaaaaagaagatagagaagctatagaaaaaatgattgataatgcctatttaaaaagattccttaaagaagagaattaattctcttctttttctttatacaaaatctcaagtaataattcataaaaagtaatatcttcactcaataaatgttctaatttcattcctatatcttcaattttttctttttttgtaacagtagtgtttgacttttccacatataccatcccccaacaaacttacgttcttaatgctagtcagaaattcccaacaaatttttaataaagtttatgtaattgtattttgattttataaaatatattttgattatccaaaatttccctagataattatcttaattatataataatacttttattctacagttgcaataaaaaactcgtaataataacaaaaaaatctattattgtagaatcttgtatgttttttctatttttatatatttttcaggatgatttttattataaaattttttataaatatataatttttttatatttatttgactttcttttaattctttaggatggatttaaattttctataaaaatcatactattttagctgtttacttgcttatttgatagttttatttctttgattaaatatctttcagaatctaagccagatgtctcaaaaaaactgatttataatataatcattttttctgctattcttatttttccaattttagtttcatattaaaatatacttttcatagacactacattctttcatactcattttcacatttaactatacaagtagtcttactcatttatgtactatactttattaatatttattaagaaaaactcaaagatttaaaaatatatattttctataaagtatatttatgaattatttcatatcttcttttaaaataacattactaacttctctatgttcatttctatacttagttggagatatattataattccttttaaataagcgactaaaataatttatgctatcaaagccacatctcatagcaatttctgtcatatttaaatctgtttcctttaaataatatatagctttatcaagcctgattccatttataaaatcgattgtagtcttacctgttatttgcttaaatgttctacaaaagtgatgtgcactcaagttcacacgactagcaagttcttttaatgtaattttatccatatatttttcttctatcaagtcaaagatacattcaaatttttctaaagaatactttctttttataaattcatcttcagaatatattttatcaatatgacttcttaataagagtactattaattgatagatattagcttttatagataactcatatccaacttctttattgtgatattcatcaagtatagttgtaatacattttaaaatcagaaaatcattttgaattaaattattaaatacaatatgatttaaagccaatggtgctaagtacttagtttgtaacaaatcaacttgattactaaaaaggaatgtgggctcaatacgaatactatagaattttaaattatctgataagctttctaaataatgtaattcattactgtttgctattacaatatttccaggcactaccttaaaattatccaatccacattcaagatatgctataccatcaataaaataatatatttgtagatgctcatgccaatgtcttttaaagtttgctccttttttaatgtcatcctttaaaaaaatatctataaagttttcttgacctttcctattaaaatatgtatttttatccttcattattcccccctcatcaaaatagtgctaattataagcaatatagttattgtattcattatttcatatcgctattatataaaatgtaactatcattgtaaacattaacataatgccagtcattataataaggaggtaataaaaatgacaaactcttttaaaaaagatgataatagaaaaaaaatcacagttttatttgtagtcattgccatgacttttatggcaacattagattcgagtattataaatgttgctctcccagttcttgcaagcaaactaaatgtatctctagcatctattgaatgggtaatagcaagttactcaattattatttgttcaacactattattttttggaagacttggagatattattggtaaatcaagagtattccaagtaggtactattctctttacatcagcttcattactatgtggattaagtaattctttaactttacttatagtttgccgctttattcaaggaataggcgcttctgcctacatggcaaacaatcatggaattatcacagaactatttccaaaagaaagcagaggaaaagccctagggattctagttactgcagttgctattggaaatatggttggaccatctgtgggaggatttattttgtcaatatttgattggaatgttatattttttataaatattccaatcggtcttattgtaatctttttaaatacaaaatttcttcctaatagtaaaaaatcttcagaaaatatggataaaactggtgctatacttcaatttttaggaacaacattattttttagtgctctaattagtgctcaacaaacaggattactaaatccatatatattaattgcactattattatcaattatttttattatattatttttgatattagaaaaaaaacatcctcaaccgcttcttgatcttgaaatttttagaaattttaaattttcattgaatttaatttgtgctcttacatcattcatttgtattgcatcatcaagtattttaattccattttacttacaaagtactatgaaacttccccctattcaagcaggtttatttatgatactatcacctttgattttagccattttttcacctatatttgggaatatatcagataaaatcaagtcagaaaaaattattttaattggtcttctcgttatgagttttggattctttctaatgtcaagattgaaagaaagttctgcccttattttatttgtaatttatatatcgataatatcaataggacaagctatatttcaacctgctaacaatgctttgataatgtcaagctgttctagaagtaagctaggagttgtaggaagcataaattcccttgtaagaaatttaggacaagttataggtattactatttctacaacacttttatataattttatgagtattaaagctggatatagggtcaatgattatgtgattaataatgataaaatatttgtatttggaatgagaaatgtttatattattgttacacttgtttgcttaataggtgcaatattaattggcttttatttatttaaatataataaaaatgaacagtagttttttataattatattcaaattatgattatattataagaaacttactaaaatacttcctttgagttaaatttaatttggacatattgacttaaaaatgttttattaatttgataaaatatttcttttcctatagtttataaataaaaatcagctgagcaaaatatttagtatattatgctcaactgattcttttattatttaactaaaacttcaatattttcatcttttccatctataactatagtacatccattatacacatctccagcaataagtttctttgcaattatagtttctaatgtatttcctatatatctcttaagaggtcttgctccatatacagggtcatatccttctctcaccataacatcttttgctgaatttgtaacttcaatagtaatatctttttcttttaatctattttttaaatctttcataaatatatctataattttcttgatattttcttggtctaaaggcttaaacattataatatcatctactctgtttaaaaactcaggtttaaatctatgcttcatttcattcattactaaattgttagtagtctctgttatatttcctcctgcttctaatagataattacttcctatattagaagtcattattataagagtatttttaaagtctactgtcttacctttattatcagtaagtctaccatcatctaatatctgtaagaacatgttaaatacatcctcatgtgctttttctatctcatcaaatagtattacagaataaggagcacgtctaactgcttctgtaagttgaccaccctcttcatatcccacgtaccctggaggaggtccaactagtcttgatacagcatgtttttccatgtattcagacatatctattcttattatattatcgtcactatcgaataaatttctagcaagagtttttgcaagttcagttttaccaacacctgtagggcctaagaaaataaatgaaccaattggttttctttcatcttttaatcctgctcttgcacgtattactgcatttgaaactgctgtaactgcttcatcttgtccaataactcttttatgaagttcatcttctagtttaagtaatttttctctttctccttcaactagtttagttactggtatacctgtccactttgatacaatgctagatatttcttcttcagtaacttcttcttttaaaagagaattttcagaaccatcattcatattttcttcgtactgctttatttgttcttctaacttaggtatttcaccatatttaacctctgctgctttgttgaaatcatattctctttcatacttttcagctttacctttagcttcgtctaattgagcctttaagtttttaatatctaatatttgactcttttctttttcatattttgctgtcatttcatcatttttagattttaactctgctatttctttttgaatatcatccaatcttgatttgcttttatcatcattttctttaagtaatgcttctctttcagtttctaatgtaaataactttcttctaacaacatctaattctgttggcaatgaatctatttcactacgaatcatagctccagcttcatcaattaaatcaattgctttatctggtaaaaatctatcttgtatatatctatgagaaagttttgctgctgctacaatagcattatcatgtattcttactccatgatgtatctcaaatctttcttttaaacctctaagtatagatattgtgtcttcaacagtaggttcttctgcaattacaggctgaaaacgtctttcaagagccttatctttttctatatactttctatattcatcaaaagtagttgcaccaatacagttcaattcacctcttgcaagcataggtttaataagattacctgcatccattgaaccttctgttttaccagctccaacgatagtatgaatctcatctataaacagtataatctttccatcagaactttgaacttcttttaaaactgcctttaatctttcttcaaattcacctctatattttgcaccagcaattaaagctcccatatcaagtgagaatacaatcttatcttttaaaccttctgggacatctcctcttactattctctctgctaacccttctacaattgcagttttacctacacctggctcaccaatcaatacaggattattttttgttcttcttgataaaattcttataatccttcttatttcttcatctctcccaattacagggtctaatttatttttcttggctaaatctactaagtttgttccatatctagcaagtgcatcatatgtgccttctgggtcttgtgtttctactctttgactacctctcacttgtgataaaatatttaaaaagtcattcttatttatattatattgttttaatattttaccaacagctgattttgattctgtttccatcattgcaagcataacatgctctacacttatatatgaatctttaaattctttagaaatactctctgcctttataagcacctcatttatttttctagtagctgatactccttgtgagtcagcaccttctccatatacttttggaagcttatcaatttcaaagtttacagtatttctcaaagaatcaattgatatattcattttttcgattatatttggtatcaatccatcctcttgattaataagtgctgagaaaagatgaattacatctacttgttggttatgattttttactgcttcgttataagcctcatttaaacttttttgaactcttaaagtcattttttctacgtccatataaatccctccattttaatattatatccaaataaattaaattctctcatttataattattgattttctaagctctaaaagactatcaagtaaattctcgtttttttgtatatcgaaactcaatgttaaattaaatgttccatctgaattaaaaaaatcgaatacttcttttgattttgctattaaatacaagtcttcatctataagtcttttttcacctattaataaatactgacatttatctataaaactctttttaaaatcaatagtgtatagattttctaaaatattatattgataaatagcaatattattaaacacttttaatatgtttgaatttacaaaattgtaaatttgattattgttatacagtgatatttgttcgtatatatattccctaaataaaggatgaatgttttgcttaagttttaaagtaacttcagctggtatttcaaaataaagcttccagtacttagagttatttttttctaaaataaaagctactttgttcaaactggtagaactaatctcctttagtgtacaattaaaattatagtgtctcaaactagttttttcattctcaaatacatagtcaaaccactgtagaacatttctatcaagttttaaactcatataaaaaccttcttccttatttactaaccttattaggtctttttatctgattatattctgctaataaactttctttatcagctctactacctttatatgctatatgtggatttatcatatactcaccatttttcactctttgtaaaaaatccatttttttcaactccgtaaacaatgaagataaagaagtttttggatattcaaattcacaagataattcatataatgtttttctaatcttattatttttatccatagagtttattaattttaatggaattaaatccctcttagtatacattccttctactactttaatataattcttaaaacaaatattcatatacttacttttattcataactaaacttttgctctctgtatattcctgatttaaatccttttttaatgtcttatccaaattaaatatctcttctcactctccttatctctaattgataatataaatatattacaaaaaaatatgtatgtcaaaactgaaaatgcaaaaagtttaccttataagtaaacttttgtttagctataagctaaactttattatttttttaatttagtatttccaatttattggcaggatttttgaataatatttataaattttttaaaaaaatttaaatctatttaatatggcagcctttcataaaatacattacatttattaaatgtataatattggtaattagttttttctaaaatcagttgacatattatatatatatttatataatgtgtatatactatatatacaatttaaggaggtgacttattgaatatagttattagtaattcgagtgggaagccaatatatgaacagattactacacaaattaaaagtatgattataagcggagagttaccagaaggctcagctcttccaagtatgagactattggcaaaggaacttagaataagtgtaattactacaaaacgagcatatagcgatttagaacgagacggatttattgagacagttactggtaaaggcagttttgtatctagtaaaaacatggattttgtcaaagaagaacaatttcgtttaattgaagaatacctacaaaaagcagttgatacagcaaaaagtagtgatattacatatgacgaattaaaagatattttatttttattatataaaggagaatgataagtatggatgcaataactataaaaaatttaaataaaacttataaagattttagcctacaagatatatctttttcagtaccaaaagggagtgtaatgggatttgtaggtgaaaatggtgcaggaaaaacaactacattaaaagcaattttaaatttaatatcttatgatagtggaaatatagaaatatttggtcttgatagtaaaaaaaatgaaaaagaaattaaagagcaaattggggttgtatttgagggaagcaactttcatgaaaatttaaacactgaccatgtttcaaaaatcatgagtaaaatctataaaaattggaatgacacattatttaaagactacttaaaaaaattgagagtaccagacaataaattaattaaggagttttcaaaggggaataagatgaaacttagtattgctgtagccttatctcataaaccaaaattattaatactagatgaggcaactagttcacttgaccctatcgttcgtgaagaaatactagatatatttttagattttatacaagatgaagaacactctattatcttatcttcacatattacaagtgatttagataagatagcagactatattacatttatacataaaggaaaaattgtatttagtgaaaataaggatgaattaattgatactatgggagttttaaaatgtaaacctagtgattttgataacctttcaagagaggattattcatattatcgtaaaagccaatttggatatgaagtacttcttaaagataaacatagatttatatcaagaaatccaaattgtattgttgataatacgtctatagaagaaattatgttattttatgtgagaggtgataaataatgaaaggtttaattttaaaagatttacttaatttgaaaggaaatgtaaagtttatacttttattcatcattatgtttgggtttatgtcttctttaggagatggaaatgttaataactttataggtgttattatagttttatgtactacaatgattgtttcaacattttcatatgatgatttaaataaatgggatagttatgtacttacaatgcctattaatcgcaatgatattgtattaagtaaatatttaactatgttaatatttagctttataggtgttcttgtttcacttattgttagtgtaactattggttattttaaaaatacacttatattaaatgaaacactacttattaatgcactaatcttatcaatttcagtatgttttggtagccttattctaccacttatttataaatttggtacagaaagagctcgtttattaatgattttatgctttttagttccaacactagctttattagtttttaaaagtattttagaaaatattagttcacctatttctatagaaattatacttaatacactagtatattctcttccatttgttgctattttactatttgtgatttcatattttatatcatcaaaaatctatagtaaaaaagaagtataaaatatactatacatgtctctgtatttaagtattttaaataaaatactatcaagtttattttggtagtattttatttttttattattaatatctactaggtatttattgttttattacttatatttaataagactatttactactttctaatcttatttatataatttattcattttataaattgaactactaatgatattattgaacatagcaatagaataacatctaaaatagtttttatgtattaaattaacttattttaatattcaacaatttaggtttactaaatttattgatgatttctttttatataacttaaactacatttttattttaaaaaatttaatatcaacaatataaaattaagaataagtattattagtttgacattagcataaatgcctattagaataatgttaaactatattctttctactgattttattaaaaaataccaatatacaaaagattatacaaggagaaagttcaaatatggaattagaaattacagaaaaaatagaaaaacaagatgaagatactatttttcaaggattattaaaatataatcttgctagacttgaagataaaaacccagtggatttaggaatatatattcgagataaagcaggtaaaattgttgcaggttttataggtgttactcatggtaattggctttctataaaatacttatgggttagtgagaagcttagatataaaggtactggaagtcaacttttatataagactgaaaaaattgctaaagaacgaggttgtaaatatgtttttttagatacattcagttttcaagcacctaaattttatgagaaatttggataccataaagtattttcacttgaaaattatcctctaactggaaagagatattattatagaaaaatactataataataaaaatcatattttatatttttaacttaaaacttctgctcttcgtctacagactttatgtttttatatcattattaatactaaaatagtattttactatacatacaaaattatttgaaagttcaaaaattataagtataaaagctaatcttagcttaaataaaaattatatttttaggaggtaaatatgttaggaaaaaaatgtatggattatctacaaacattaggaaaaataagttcaacaacaaatggtcttacaagacttatcttgactcaagaacataaaaaatctattgatttaattagttcatggatggaaggtttaaatcttgatattgaaattgatgacattggaaacgttataggtacatataaatcaagctttccaaatgctcccacattagtagttgcatctcatcaagatagtgtaaagtgtggaggtatatttgatggtatgttaggtataatagtgcctctagttggtcttgaagaagcaaaacacaataataggtcttatcctttcaatattaagctaattgctttcgctgaagaggaaggaactagatttgaaacttctttaatgggaagtaaagtttttgctggtacttttaaagaggaacttcttaaatctgttgatgaaaatggaattacacttgaagaagctgtaacaaagtttggatttaatacaaaaaacttaacaaatttgcatcctagaaaagatgtagatgcatatttagaatttcatatcgagcagggtcctgttttagaaaatgaatctcttcctgctggaattgtatcaagtattacaggatttaaaagttttaagatatcagtaaatggtaagtctggacatgctggtacacttccaatgaatatgagacttgatgctggatgttgtgcctgtgaatgtgtattagctatcgaaaaagtagctaaaacgactgctgatttggttgctactgtaggaaagatgaatttctatccatcttcatcaaatgtggtacctgaaagagctgaatttacactcgatgtacgctcttgttcacaagaaattcttgataattctgtagaaaagatatttaatgaaatatcacatatatgtgaaaatagaaaacttaattatacaagtgaacttgcttttgaaaatgttcctgtaccatgttctaataaaataacaaaaatcatagaaaaaagttttatagatttaaatcttaatcctttttatatttatagtggtgctggccatgatgctcaggaaatggataatataactgatattggtatggtatttataagatgtgctgggggcgtaagtcataatcctaatgaaagtgtttctgtagatgacttggatactgctgtaaaaatatttttaaaaatactagataatcttgatttaaaataatttttatataagaaagtatattaaaatatataatctaaaaaatcactttatatttatattatacaagtgtacaatataatctattataaaatataattttatgcttttatagatttttattttatacataaatatatttatatataaaggagataatttttatgaatgaaaaattaattggtattttggctggaatgggtccaaggtcaacagccccttttgttgatttaattattgatgagtgtcaatctcaatatggagcaaaatatgatgatgaatttccaaagatgatgatatattcattacctaccccattttatattgaccgtccaataaatcatgaacttatgaaagaaactataattgatggattacaaaagcttgaatcaactggtgtaaattttattgcaatgccatgcaattcagcacatatatactttaaagaattaaaagagtctattaatataccaatattaaatattgtagaagaaacagttaaaaaattacctactatctcacaaaaagtaactcttttttcgactagttcaacttttgagtctacaatttaccagaatggtataatacataatggacatgaatttatatttaaagatgaatggcaaataaaattaaacaatcttattcaaaatataaaaatggataaagaaaatccacacaatattgatatttggaataaacttatcgaagatgttaaaaatgaatctatagaaaatatagtaattgcttgtactgatttaaatgtagttttagaaaaatcatatccttcaataaatattgttgattcatcaaaatgcttggctgaatcagttgtcaataaatatctaaaattagttaaataaatttttcatgcactatattataaaaaatatatgttataagtttattttaaatagtatagacttataacatatatcatagtttcttgacaatatagaaattaaccatgtatttcattatattaataaaaaggataccaaaaatggtatccttcataaatatttatatgtttatttataaaaataatcatatatttattactttactacacctaaacaatattattcaagtgtattcatagagttagaaaattcttgtcctgctgtaacaagattagataacaatacatcagctactgcatcatttactgaacttattatccatttattatcctttttagaacattcaaactctacagtttttgtaacataagtctctttaacgcttttttgtttttctttcataattgatactaacatttcagttgttttctcatcagttaagtcttgtcctgaaaaactcataccaatcatctttgtaaatgcctcagctactatttcttgaagtaatggtgttgaatctataaatttacattctactttgattgtagccttatcacctttaacctcgctgtcttttattgtatacgtgattttagatgcattctgttttagataatctaaaacatattgggcatttgggtcttttgtatctaattcctttaatatatccttatatttttcgtcattattttccattaccttattcatgccttcaaagtcaaactttttcgcactgttaaaaaaactatcaattgtatcttctggttttgcacttgaacatgctgttaaagatattgctaataaaaaagttgttaaagctaatatgatttttttcatatctcaaatcctccctcttaatttgttgatacataagttattttaacatataatgagagtttttgaataatatatttaaaatattttataaattttcattaaagtaaagtctatattaaaacatatctatattaaattattgttcatatttacatcagtcatagtagaaaccataacagcttttattgtatgcattctattttcagcttcttcaaatacctttgaatattttgaattaaatacctcgtttgtaacctctaattctgataatccgaacttttcataaatcttctgagcaaccttagtttctaaatcatgaaatgctggaagacagtgtaaaaatataacattttcattttcagttttctttatcatatccatatttacttgataatctttaagttgatttattcttgcttcatattgctcctcttctcccatagaaacccatacatctgtatatataacatctgcacctttaacatcatcaatattttcagtcaacattatatctcctttggatttcttggctatttccttcatttccttaaccaattcttcatttggccaaagttccttaggtgctagtgctacgaaatgtattcccattttagcacatcctatcatcagtgagtttcccatattatttctagcatcaccaacatatacaaatttaactttattcaaatctttatctacattttcaattactgttaaaaaatctgccagtatttgtgttggatgatattcatctgtaagtccattccaaacaggtacaccagaatattttgctagactttcaactgtttcttgtttaaagcctctaaattctattccatcatagaatcttcctagaacttttgctgtatctgatacagactcttttttacccatatgacaatcatttggacctagataagttacatatgctccttcatcatgagctgctacttcaaatgaacatctagttcttgttgatgttttctcaaataataaagctatattttttccttgtagcaaatcgccttttatgccaacttttttcttagtttttaaataacttgataaagttaataaatatctaatctcttcttttgtaaaatcctttaatgtcaaaaaactcttaccttttaaacttatattattcatattaattcgccccttcttataaacttcttaaattcaattaaacttgttagcactttacttttttatttacttctaatttttatctttaattaactattttttgaatatttagttaatctctagtaatatatcttttaggatttcaagagcctcatctatttccttataactgattgttaatggtggtaaaaatctcaatacattttttccagcagtcaaaataagcaatcctttttttctagctttctcttctataatactagattcaatattagtttcaattcctatcattagaccaataccttttgtctttaatacaactttattattaaaactttcaatagattttcttatataatttcctttttctaatacttcattataaaaaccatctttagatatctcatctaatacaactgaagctgccaccatagctaataaattacctccaaaagttgtaccttggtctccttttcctagtacttttgaaagttttttatttaccaatactcctcctactggtattcctgctcccaacccttttgctacggtaactatatctggttttacatcaaaatattcatagccaaaaagtttaccagttcttcctataccgcattggacttcatcaaaaatcactacaatatccttttcttgacatatttttactatttccaaaacataatctttttcaagaacattaactccaccttcgccttgaatcgcttcaagaattattgcacaaactgtggaatcaagattattttttaaatcttcaatattatttctttctatatatttaaaaccttcgggaagaggataaaaatacttatggtatttgtccataccagttgccattaaagacatcattgttctaccatgaaaagagtcttttaaacttatgatagttcctctaccattaccatatttgtcactactatactttcttgctattttgaatgctgtttcatttgcttctgttccagaattacaaaaatatactttagccattccacttgaattaattattttctctcctgaatacaacactggctcattaaaatataaatttgaagtatgtaataatttatctacttgctcttttagagcattctttaaattactattactatacccaagagaagatactccatatccacttgtaaaatctatgtatttattgccattagtatcaaaaaaacaacttccttcaccataatctatgacaaaattgggttggttatatgtatctataaaatattcattccattttgaaattgtattgttgttattcattcttattctcccctcttaaacttataattttattcattttcttttcttattaatgtacctattccactatcagtaaatagctctgttattatagaatgtggaactcttccatccaaaatatgtaccctatttactccgttatttaaggcatctacgcatccctctattttaggtatcatacctccagtaattataccttcttcaaataatttatcaacatcctctaatataacttctgttattaatgatttttcttcatctggctctcttaacaaaccagggacatctgtaagaagtatcaatttatctgcatttaactctttagctatagcagaagctgctgtgtcaccatttatattataagtctctccatcatctccaacacctatagttgcaattactgaaatataacctgactttagacaagattctataagctcaacatttacttttttgatttctcctacaaatccaagttcataatttttatatgggtcacataaaatcatattattatccattccacaaagccctactgcttttccaccttttgtatgtattttatttactaggtctttattaacctttccagcaagtaccatttttacaatttccatggtctcttcatctgtatatctaagaccatttacaaatttactttctatatccacttttgctagcatcttattgatttctgcccctccaccatgtactaaaactatattgattccaacataactcattaatacaaggtcttccataacagattcttttagaccatcttttttcattgcacttccaccatacttaactacaatagtctttccctgatgtttttctatatatggtaaagcttctataagtgtatttgctttttctatattaatcattaaagtatatcctcctaatttctataacttccatttattcttacataatcatagcttaaatcacatccccatgcatttcctctggcattgcccatatttaaatctactaatatacttatttcgtcatcttcaaggattttttttgctttttcctcattaaaatctaatccatttccatttttacatacttcaatatatcctttcatactctcaaaaataatatcaactttttccatatctatttcttcacctgcataacctaaagcacacagtattctaccccaatttgcgtcagctccaaatacagctgtctttactaatgaagaagatataactgtttttgctaattttactgcatgttcttcacttaatgctccatttatataacattcaattagttttgtacatccttctccatcttttgcaacaagtttagcaagttctatacagacatatgtaagtgcactcaaaaatacttgataatgttcatcttttttgtttattctatcattttttgcttttccatttgctagaatcatcaccatatcattagtacttgtatctccatctacactaactctattaaaacttttatcaacagcaattttcaaagcttcttttagcaaaactccatcaatatttgcatctgtagttataaatcctaacgttgttgccatattaggatgtatcatgccagaaccttttgccatacctccaatagttatttttttatctccatacattattgctactgctatttctttttttataatatcagttgtcataatagcttctcttgctccaatatgaccttgtttacttagattattcactaattcatccatattttcttctattaaatttatatttaatggctttcctatgacacctgtagatgcaaccaaaacatcattttctttaatatttaatttatcactagtgaatttagccattttataagcatttataagtccttcttttccattaaaggtattagcattagcactatttactatgatagcttgtgcttttccatttttaatgtgttcctgtgtaacataaacaggattgccctttactttattttgagttactactgctgctgcatcacataaaacatctgaataaaccaaagctaaatctcttttttctttattttttctcaagccacagtgaatccctgaagcaaaaaatccttctgaaactgtaactccaccctttataatctccatatttatcctcctaattatatgagtttagtattttttcattactaaaatgatggtgcaatattttttaaacctgtattttcttcaataccaaatattatattcatgttttgtatagcttgacctgctgctcccttaatcatattatctatagctgaacagattatcaatgtatctccattttcatgtaatgatatgacacatttatttgagaacctaacattctttaaagaagctaccttatctaatgggagaacttctataaattctttaaattcataataatcagttaattttctatgtatatcatttatagaaatattatcttcttttgtacaatatatagttgataagattcccctatttactggtattaagtttggtgtaaaaactacacttactttttctttgcaggattcacttaaattttgttctatttctggagtatgtctgtgtttccctattttatatgcagtgatattttcattaacctccgtaaagtgactactaatcgataattctctaccagcacctgtaagacctgatttagaatcaattattatattattattttttatcaatttagaacttagtaatggcatcaatggtaaagaaatactagttggataacatccaggatttgcaattatatctgcatcttttatatcttctttgtatatttcacttaatccatatacagcttttttatgtaagattttatctataaaagatactccataccatttactatatacttcttcatcttttattctaaagtcagcacctaaatctataactttctttttcgatttaattgcttttattacaaacttttcactaactccatgtggaagggctgtaaacacaacatcacacatatctataactttttcattttctatacatatcatgttatttttatatcctatacttggatatatatcaactatattttttccaacatacgaatttgaacctattgctgtcacttcgactttatcatgattcattaataatctaatcaactctgccccgacatatccagttgcgccaataataccaacttttattttattcattttgttccctccatttttatattcaaatagtattaaaattctatctttccactttactatatgataatcatttgataatatgtagattaaaatattctaattaaaacaaaaaaccccttagcattataaatactaagaggcgattttccgcggtaccactctcattggtaaaattacaataatcattaaaactcaaattaaaaagtatctacaaaatgtacatttaaaattaaaaaagcctcttggtcaaagaccaagagacgaatatacacccgcgttaccactctaattgataagataatcttacccactctaatctcttaaggcgagattcaccaattaccatactattacttctggtaatctcctccaaagctctattcacaataaaattcgttactaggcttccaccattcccagctctctatcaactagctttatgctactctctttttcacaggatttcaatttattttcttattgttttatatgatagtttatttttttaactttgtcaatataatttttaaatttttggaaatattttctatatggttaatttccagcattttgtatctaaattgagttataatctttatattatcattcatcaacttaagaaatttccaaaatatattggattataaaataatgtaatctcaaaatacaatatttacatctatttttagttaaatttttttaatgttggtatctaaaaatttctcaatctttttctcagaaagtatctcgttggttacaaattcaccattaaaaaaaagactgtatgtagtaaatggtgcaggagcattttgtgcttcttttgctgtttcgaattttataagatttacatcaatacctctagaatttgcaatttttttcaaaataggagcatatttttctgtatgtggacactgattactgtaatataaaactataccgttctcatttaattttcttttttttacacaattcttaaaacatggaataggagcattatcagtaaagggaaaatataatagctcataatttggttctgatgtatctgctaaacaaaagcccttatattttagatatttagcatcagataaaaaaggcatttttttactagacgaaagcacaactaatccatatttaccttttgattttgcatcatcaacacactcttgtagcaatagattagaatatccttgacccttaaattttccagatatccaaaaacagttaataaatatataattgtccgcagtaataggacaccatgcattttctgctggaatatattctataaaagctttacctcttacatcaaatcgtttaaaggctagacctttatcaaaattatttttcatccaagcttttttagaaaaaacacaattttctccttttttttcagaaattgaacagcatatatgtctactgtcaatattatttatatttatatctataatctgcatacttatctccttttctaattacataataatttttaaatatattctatatatttttatcttaatattttgaatacaacaacatcatgtcatatatatttttattttacataatattatttttagattatttgaattatcaaattgcatatataattaaatacattctaggtctaaccacactatatataaactatatattatcataatattctaaatttataaaacaaattgtattgaattaaatttatttaagatatataattataattataattaaaataataataaaggtgttgtttataatgttcaaagaatacttaataagagaattaaaagaagatgatattaaaaatgcattagacttaatctggaatgtatttgaagaatttgaatctccagattattgtgatgaaggaattacgacatttcatcaatttatagaatataattctattattgaaaaaatcaaagaaaaaacactcttcttttggggttgttttgactctaaaaaacttattggagtcttagctattagaaatttaaatcatatatgtatgttatttgtagataaaaactatcataaacatggtgttgcaaaaaaattaatgactacaggcatacaatactgtatttgtaataaatttaatttaactgaaataactgtaaattcatcaccttatgctgttgaagtttatcataaattaggatttgaagatattgctgttgagcaaattgttgacggtatacgttttacacctatgaaattgttaatataataaattaaataaaaagcaaagtctcttaaatattttatagttactttgcttttaaaccaagatttaaaataatactatcttttttgttttttaataatatactttaaaagccttactaatatgaactataatttattttttgatatcctttttgattaacatataaattaattcaattattaaacataaactatgttgtttctctttatatctcttctttgtaaacaatattgggcatttgaaaataaatattcttaaaatatactgttctcctgttgattttcctttggtacaaatgataaaattttaatttacatgctccgtaatgaagtgtttaataaataagttaaaataatttatttacctccttaatcatattttttatgaatacctaataacacagtatcaatagaatcggctaaaccttttatagcttcttctttactcaaaagtgatttcccaagttgcaaagtcgaataaccatgaagtacactcattattaagtttaatacttcacctgtattctttgtatttagattacaagaaagaataagtttttctaataaggatttatattcatcaaagatttctaatgtttcattatttccatgccaagtagcccactgaattgtttcataaacaccaggattagaaattataaaattaaagtatgctatacttatacactttatagctgtatctccaaaatttccaatagtcgcctttatcatttgactattcatctctctcattcctttatgagctacttcaagtaataaatcatctagactttctatatgattgtacaaagatggtgtacgtattcctagcttttctgcaataacttttaaagaaactttgttaagcccatctttattaactatatctgatgtagcttgtataactatttctctactaacacgcatgattttccctctttcatttaaaattaattactttattagtttagctaatctaattagtttcgtcaattattgtaatttataaaattctttatactcttataaaatcttgacagtttaattataatttaatataatactaattgaattagttttaatactaatataattagtattatattaaattatatattacaacattattttatagtttgattaattcaacaatcactaatatatcaaactgaaaggagatttttatggaaaaaaaatatttcgaaattcatggagttccttcaatcctttggggaaatccttcaagtaaattatatatttacatacatggacaatgcggcaataaagaggaggctgaagcttttgctaatattgcagttccacatgagtatcaagttttaagtgttgatttgcctgaacatggagaacgtaaaagagaaaaaaattcatttaacccatggcatgttgttccagaattagtatctattatggaatatgcaaagtgccactggaatcaaatttcgttatatgcaaatagcattggagcatggtttagtatgttaagctttgaaaaagagaacttaagagagtgtatttttgtatctccaattctagatatgcaacagctcatttcaaatatgatgctttgggcaaatgtatcagaagaacagcttaaacatgaactaattatcccaacttcatttgggcatactctttcatgggaatatctacaatatgtaaaacaacatcctatcactcaatggaatgtaccaacaaaaatattatatggtaaacatgatgaacttactgaaatcggtgttgtagagaaatttgtagaaaagtttaattgcaaccttactattctggaaaatggcaaacattggtttaacacaccacaagaattaaattcattatatgaatggttaaatactttagttaaataaaaaataattatattattaatatgattaaattatttataaatgttatttaattaattttattttagcattattaaaataactacataaagaataaattagttattattaaagaaattaaaagtatatagagtattaataattttttaataattagttattatagaaaaaagagggatataatattgtctccctctctttcttctgtaatattatataatttttatttatcactctcaataaattatagttatctacaaaattcaatctttaatacattattaatatattgtgatattaatattacagtattaaataaaatctaataaaattaactataaaatatctattatataaatatccactcttatgtttgaaatctgtcatatagttttatccttcttatcttttatatcaataactttttttaataaaattgacaaaacaaagtaaaaaaccttattgataatgaaacaaatgatactataagttctgatattatagtaattgcatataaatagacatcataacaataatataatattgtcactataaaattaaatgtaaaaatctccaatctaactaaatacacatataggtattttttaagtttttaggtatttcttctgaaaatgatttattgattgataccaatttacataatctttttaatataaacaatgatacaatatatgggacagcacatatgtatatagctacttatattacatattacagttggcatattcgtatttgtaatgcttataccaattttaaaatacaccatcagtactaatggcattaaaataatctataataaagttaaaattattccaattagtacaatattatttaatattttacaactcatattcttttttatataaatttaccaccttatacattcttatttttagtgtatattataatggttttatatattatatcaacaatttattattgaaattcaataaattatatattataatcaataatatactttatataaaggagatgatattttatgattacaaaattttttagtaatatattatcagtatttctatattttctattatcacttttaggagttgctggtataatattcttatgtatgatacctatgtttttatatgattttagttctgacaaagtaatcgctttaattgcaagaatactatatttttctgactactttatagtcatcttattcttgatatttataattaatagtactaagtattccccattcatacttgaaaatgtaaaaaggtttaaagtaatgggatgttgtttattgataaacactataattgaatgtgtaattggttataactcaaatactagtcttataatgatatttggagataatagtggcggtatctcaccacttatggttatttcttttatatttgcactaatgtgctttgtaattgcagaaacatttgataaagctataaaaataaaagaagataatgatttaacgatatagaggtgatgttatggcaatagtagttaacctagatgtaatgatggcaaaaaggaaaatatcacttaaagatttggcagaaaaaatagatattacaaatgcaaatttatcaattttaaaaactggaaaagcaaaagctattagatttaccactctaaacgaaatttgcaaagctttagactgtcagccaggtgatatacttgaatatgtagaagatgaaaatgattaaaaaagagtgtttagaaacactcttttttattatactatatgatttttattcttttactatattattgacattaatattaactttgtttaaagtcataacaaaatacgttctaagaaagaaactgttcctttttctatttgttatccattacctataagaactgtatcacactaaatcatacttttaaattgataattttgccacagattcctatatacattcttttctacctaatatttatttaaactgttagcaaaacatggaactttttcatttacttatacctccatttatattattgcatagtttatagctacgtgttataaattacattattgatgatttatctaacatttgtaatcttttagatactctttgaagttacaacactgttatactctaattaagtaaactaaatctgatacaagttggtgattatatgaaaagaaaactttcaacctattttaaaggatatattttaggtttatgtatagcatttttattatttacttttatattaaaaaaattaattatagaaaatatcattggaataataattggaactggaattgcatttttactgatttacctatttaataaaaaaagaaaataatattctataaaaaggtcttttagtgaatttacaaaaaattaataagaataatatatacttagtatttaaaaagggtaacaactctctctagctgttaccttatatatttatctatatctttagtattaagttttttaatttctacttttttaattatcaatttctgtatgtagatatactaaaccttccaacttgagatttaaataacttttcaatctcataaactattctatacaccttattttcgtactctaaatcataatacacatttatttcacctatactgtttacacttatcgtataatgttctttttctattatacatattcttccaaaatctgacaggtcattatctatcaattttaactgtttttttatttttgaaaaatctaatcttggaaatatgtcattaggataaaaacttttattatatacaagcatttcatccaccccttatttattctatttatatcattttataccctaattaataatttattaatcatctttttccatattattcaaattctcttatataaaaacaaaatcaatttagaatatgtattattaaatataaagtgactcaatctttatttaataagaaaaaacatttatattacatataattaatataaaactaatgaagtgggtgtatgaaagagaaaacacaattttaatttacattccatatagttaatataaaacagttgtttttattttttctaaagagaaaaaactagactttacattccatatagttaatataaaactttctgtatattttagttgtgttttaatattataacactttacattccatatagttaatataaaacatggcagtaactaagaagaaaactataccttttttattctttacattccatatagttaatataaaacgaggaaattttatactaatgactgatgctagatttaactttacattccatatagttaatataaaactattataaggagcattatacgaccaaaagccaaagcagctttacattccatatagttaatataaaacaagcaacagcaagagtcgcgacaacattaaaaacttcctttacattccatatagttaatataaaacctttatttttttctctatatcgagttcgccaaattcactctttacattccatatagttaatataaaacagtccagcgttgtgtggtcgtaacacaccaatcctactttacattccatatagttaatataaaaccccaaaataaattaagtatttccaatacttatacatatacaattctcctaaacttgcagtgagcgagcaatagtgcaattgataacagttatcatacactctcaacgctttatatttcaactattaaaccctactttatcacaaaaatcgctcactgcaaaacttttatatttttattatatcataaaactcatactataaaataaaaatgggataattttacaaactaaaagcatctacattcttataagtatttattatattctctattccaatgattcctttttctttttattgcatccttcctatgtaatcgcactttagctcaacaagtcttttattttcattaacaattttttaaactattcaaaatcatcaaatttttcatcttatacagttaaatcaaaatacgtgttatatctctttatctatatacttttcttccttccatttctttttctctttctacattttcactttgttactttacaatctcaaggttattatctgctattaaagttttatctttccaggtttcacaaaaataaattgaataagtgcaaaaataacagatacaaaaccataactattttcttttctataaaaaaatatatcatcaacaagaaacataataaatgaaaataactatgaataaatactctcatttagaagaaatagacaaagatattccttaaaatttaagcaaaatattgtttaaataaaaaaactgactgtcagttaaatgccagtcagctattttatatattttatccaaacatcactatatttgaacattttaataattaataatacttattaatatacaaactttactcatacacagaatatcttttccaaatttgctctaaatcatcaaaatgctgtttaatatcttctttttccttcattccaacagatatagcaagggcatttgaaatactaagagctggaactagagaatctacaaatgaagccatattactcttaactagaagagtgttatctgcaagtgatgctactggcgcaaataagctatctgttaatgatattacatgggctcctttttctttagcataattgacaatttgataagatttcttagaataacgagggaaactaatagcaactattacatcttcttcatttattcttacaatctgctcaaaagcatctcccatatccattctaattatatgaacattgtcaagtattatatctaagtaaaaacctaaatattgagctactacaaaagaactcctcattccaagtatatatatttttctcgctcttaaaagtttgttagaagcttctttaaacgctctctcgtcaatttcttctagtgtagaccttatattatctatatcactttttaaaactttgtttagtattgcaaaatcatcggaataatcatgtgccatttcaactctttgtactgtagttagtttattttttatgagttcttgaagtgcagcttgtaatttaggatatccactataacctaatgcatttgcaaatcttacaactgtagactcacttactcctacggtttcacccaatttacatgcagtcataaatgcaactttatcataattatttaaaatgtattgtgctataagtttttgacccttactcaatctcgtatattgagattgtatatttgatatcaaatgtttactgtccttcatttcatttgtttcttccatttttttctccttttagttatataaactattttgttttattaacactgtctttttctctaaaaattttattttttatctcaatttcatcttagtttttatcatagcttcttaaactcataaaattctaacttttctgtaccttatacttcacatagtattttcgattaaatttattataccatctttccttgcattttttaatatttatccaatatttcttttaaatttttcaatttttactcatttaaaagttatctatcttattttgcatatttagatgtatattttgttttgagaataagctgttgtatacttattatttaaagtatttttaataggtcacactatatatattaactcttaatagaatcttgtcaagttttttagtatttattatgcttttttcttttcaattaaaatcaattgtggtgggttattgacttgatttaaaaacttagattctaaaacattaaattcatcttgatttaaattattgacaaggttatatatgcaatctttttcttcttgacctccatcatgccctgtatatatggcaatgcttattactccattttcttttaacatttctaaacttaactttatagcctttaaagttgtatctggtttggttataattgaatgtttcgctcttggaagataacccaaattaaataaaacacatgaaacttcttcttttatatattgattcattttttcatgcccatcaaatatcaactttactctatctgtatatccttctttctctagtttctttcttgtagactttattgcttcttcttgtatatcaaaagcatatacaaagcccttttctccaaccttctcagctagataccttgtatcatacccatttcccatagtagcatcaattactatgtccccttcatttataatattttctaaataaaatttatttatatctgtaattttagttaaatactttgcatatgccataatactatttctccctactattaactttatttcattttttctcaatttatttttatcttattttattgattttaaatattttatttcatcttctgttaggtatctatattctccaactttggtgtcttttaatactattttccccacagaaatccttcttaaatttaaaactggatgatttatagctttgcacatttttcttacttgtctatttctaccctcatgtatagttatttcacacactgaataatttttttctttattttctttagttacccttattttggcaggtgccgttgtgtaatcttctatttttagtcctgtttcgaattgtcttatctcatcatcacttataattcccttcacacttgccacatacgttttatcaatttcatgctttggatgggtaagcttatatgttaaatcgccatcattagtaagtattaataaaccactagtttcataatctaatctccctattggatatactctttcccttacatctttaagtatgtctattacactgggtctattgaattggtcttttactgtagttatatatccctctggtttatttaatactatatatatataattttcacttggttttacttttttattatcaaattctactatgtctttttcttcatcaatattaaaagataactcttttactacacttccatttacctttattcttcctccaagaattatttcttctgattttcttcttgatgctattccacaagaagctatatacttattaattctcatacttaatccttccttatcttaaattatgtgtgtttaatatttttatcaatgttaattttgctacattattatactatactagaccttaattaaaaacaagcaaaaaaattatttaattttcctaaataattgtaatttcttttcacatactattaatatgtaatagctgactaaacactattttaaggaagtgattattattttaaaggaaaatataaaatattatttaatagtcgtgtttattggaattttattttttaaatttattaatactccatcaaactttatatctagtattgaaggattcttaaagttttttagcccatttttattagctattttacttgctttacttttaaatccacttgtgatgctttttgaggtaaaattcaaagcacatagacttttagccatttttttatcttatatatttataggttttattttagcctttgccattaggctattaattccatcaatagctaatacattaaatagattgataaatgaaatgcctatgtatactgattatatagatagttttatagaaaaaaatatgtcaaacatagattttctaaaaactttaattcctcatatacaacatagtttagataatttattaaaagaagcaagtaattttgttggtaaaattcctaaaaacttcttaatctatacacttagtatatcttctatgctatttaatatgacaatgggatttatactatccatatacattatatatgacaaagaaaaaattgcattgggatttaagagatttctatattcttctactgctagaaacaaggcagataacattatagaattttttaggactactcatgatattttctatgattatttacttggtagaatattagactctcttattattggtataattgcatttttaggatttcaatttgttatcagaatagaaaatgctttatttttagcttcaataatattcttaggtaatataattccctattttggtccttttattggtgcaatccctccaatagccatgactatattatatagtccacaaaaaactatatgggtcattgcatttctatttatattgcaacaattagatggaaattttatagaaccaaaagttatgggtaatcaagttggtataggagctatatgggtaatatctgctattttggtgggacaatctctatttggtttcataggagtttttctttcagtaccaatagctgctgttgtaaaaacttatgttgataaatatatagataatcgtttacaatagcttatctctactgtgactttaatttttagtttaaaatttaactgttatttattaaattatttctcaaaaaatatctcttagtaagaaaaaattgctaagagatattttttataatatataatttgttcattaaatttatgcatatattttatacttattgattatttgagttttgagaatttccaccactatctgaaccaccagtagtatcttgtggagttggtgctggtgttggattactattatttggcttttcttgattttgagaagaactgttattattgtcagacttattactatctgattttttatcattatttttagaactatatttattatttttactacttccactataagaagatttccttgcatctgattcaactctatacctatcttctccagccgtatcttttgcctttttctttctttgttcctctgcttcgttttgttctttttctaatttagttaactcttctttctttttagttgcctcttctttaataacagaggaaccatttttgattttctctataagtttaagttccttgattgcaccctcataattttttaattcttcaaactccgtcatatttgacattctcatagcttgcatatacatagctcttgcattctcattagtactatcttcttccagtgcagaggataatgattccatagcttttttatagttatgtttttctaaatatgtttttccttgctctactaaatttatttcatcttttttattaaatgaacatcctacaagaaatatagataatatcgatattaataaaattactcttcctctcattaaatccctccttgtcatatactttaaattttatcataattataaagtttttaaaatattttatatttattacaagaaatttgttagtaaaacaaaaaataagcagatatgctacgaacgatacaataaaccaaaaattaatttagagatacatatcctagcaaatctgctcataataaactttaatatttaatttttattatatacttttccattttatatctctaaagctaataagtcctcatagctttgtctcttacaaattatcttatcatttccatcaaatactgatactactgctgctcttggtattttattataatttgaagacattgaatatccatatgcaccagttgatgttgttataagtatatctccacttttaatatccattatgtttatatctccaattaatatatctccactctcacaacattttccagctattgttacatgattcatagcctcatgattaattttattcacaatactacactcataactagcttggtacaacgaaggtcttacattatctgtcatacctccatctacacttacataaaccctaacatcttttatatcttttatagaacctactgtatacaatgtacttcctgcatttgcaactattgatcttcctggttctattaccaatgtaggtacttctattccaagctctttacatgaagtttctgctttagtgattatggtttcacaaaactcttttatagttttaggtttatctccttcgctataataaacgccaactcctccacctaagtcaatttctgttagttgtatgttgaatttttcttttatttcttttaccaagttcatcattatatccactgtatctatgtatggttctacatcaaatatttgtgaacctatatgagcgtgaagacctacaagtttaatatttttatattcacttaatttttctattgctctaaataaatctccatttactaaagcaaatccaaatttagaatctatctgtccagtttttatataatcatgtgtatgagcttctataccaggagttattctaaagtatatctcttgagttttacctttatcttcacataatgcttcaagcaaatctaattcataaaaattatccactacaaatttacctacacctaaatctaatcccatgtttatttcttctttagtcttattgtttccatgaaagaaaactttttccataggaaaatttgatttataagctgtatataactcgcctcctgaaactacatctaaacacatttgttcttcatttataagattacacatgtaaagaggtaaaaaagctttccctgcataagcaaccttattttttccctctctagccttaaaatattctatatattctctacaattttgtctaactaaagcttcatcaaatacataaagtggagtttgatattttttactaagttctaaacaactcactcctccaatatataattcatcattatttacagtcatagttccatgaagtttcataatagcctccccaaattttatatattaaatacttctgctattttttctatagctacttgcttatcatcagaatttatagcacaagttatacgaatctctgatgtagttataagttttatcattataccattttcattgaatatcttaaatactttagcagcaactccagaagtatttttcataccaagacctactaaagaaaatttagtgatattattatcaatcactacatgttcttcatctgtatatttagatactatctttttacattctcccaactcttcttttggaactgtaaatgatacacttatcttatctaaaataggtgcagtttggcttatcatatctacacttatacctatagttgctatatcttcaaataagctagatatattttcagctttaaaatcttttattgttatagaactgtcatcatcactagtagctaatcctgttattactttatcctctaatttcatgtcttttccccctcttatatatgttcctttttctgtaccacatgtacgtccgacatagatttcaacaccatatttttgtgcaagctctatacttcttgaatgcattacttgtgctcctaaactcgctaactcaagcatttcttcatattcaatctcatcaagtttactagcctttgaatattttcttgggtctgtaaaataaattccatcaacatctgtatatatctcacattttccatttaatttaaccgcaagagctacagcagacgtatctgaaccacctcttccaagagtggttacatcaccatcttcgttgattccctgaaatccagttactatcacgacatttccttcatctaaactatttttaattctgtttacgtttatatcatcaatttgagactttccatgaagaccactcgtttttatatttaactgataagcattataacttatagctttacatccaagtgcatttaatgctattgataataaagatgctgaaatcatttcaccagtagacattaaagcatctaattccctcttactaggttcattactcaattcctttgctaaagttatatattcatcagtggattttcccatggcagacacaactattaccatttgtggattttcttttcttcgttctattatattttctgctattgattttattttttcagtatctgctactgaacttccaccatatttttgaacaattatactcatgctttctccccctcaagctaaattttgataaataaaaacgcccaaaggtatactttggacgtgtaaatttcatagaccaagtaaccttgtagctcaccactttaaaagtgacagccttatgcatattctgcataagtccagaaaatttgtccgtcaacaaaatttcttcggctatataccctttcatcaattatcaatgcttaccagctcctattgaatactattgaatacagctacctctaccctaggctcattatttttaattaatttattaatatagttttatcatattctatataatattgcaacaattattttacaaaatgtggcaaatcgatagttttcttttctaaagttagcttatatacaattaaatagtttatttaatcctaaatctataaaatttatgctatactcattatcatatctctctaaatcatttaattcggatagattatctggtgtaactaccaaaacgtttggtactttaaaaaatggaattgtagatttatctatttttttagaaagattttcgtatttagaaatgtctatttcattatttaagtcaacatcaactaaaacttgctttatattaccaaattggtctgtatattcaataaataaatcgtatttcacatcatctacactaacatttcggtaaaatctttttacatcacaacctgcagtattgattctaacaactaattctgatcctactagagcctttattaaatcatctcccttaaaaagtttactaccgtttaaataatatacataagagaggtctttataattataataatccacatcacaaggatatttttttagtgtatattcactacacatttttctcaaagtttttttaaaattttttttattgtatcttttttggtctccataaatttttctaaattgagactctgtaacacatctaaccctgctaattaaaagtaatatctctttttccatattcgtcatagtacattctccttgaagtattatttgcaaagttgtactaatattatattaattttatgacattaaatttacaaagaattaaaataaaatagctaatttttatagaattaaattctataaaaattagctatcactatgttaaatactattatcaatctttttatttaaattatacattaccttgattttcagaatctttggaatctgtattttcatcagttcctgttttttcttttgcttttttatcttcaaagtttgcaatatttaggttatcaaattctgacatttctattacaccagattcttcttttgaatacgatattttgactttatcaccaacctgagtcaatggcaattcgctagatacttttgaagtagccctaaatattatatctttatttgaatctaaagttacataataattagtgttaccacctcgcacatctgggcttattcttgtcactgtgccttctaatacctcatcttttaaatcattatcaagttttaaatcattacccttagattctaatgcatccttatagtttcttaatgcttcattcttatcttcacctattccaagtacattataatcttcaacagatacaaatgcaactctcttaacaagaccagccttatcttttaatgatgatacatatgttggctgacccaatatattatacattacagggaacgtcgcttcataatttttttcttgaacattaccttcagctgatttcattgcagccgtttcagtagctcctggttgtttatataatctagcttcttttgttctagaatcaactaacataaatccaattgtagattcatctccacctgaagatgttatacctgtataccaataagacctgttatcattgccataaactaatgatgtaccttctgttggtactaaaactcccttttctgatataacagagtttaaaaatccattaacataaacaccccagtctttaatctggtctgttacaaagctttgtggttgtattctatccacccatttaggtgtgtttttaacatcataaacatttatttttccagtttctgcatcaacagtggctattcctgttgcatttgctcctccatagccaattttatgttcatataaacttacaacccaataaggtcttccttcatcatttatttcaagagtgaaatctgtcataccaacatttacaataccatgtatgtataaatgtctttgtaaatcctgatgtaagtaggcttctggttggtaaactatctttattggctttccatctatttcttgaactaattggacgtcttgaggattactagctgatacttttacataaccacttgtaccacttagagatgttatccatttaattatgtctctgtgaacaagaggcgctacccagtacaactctccatctacattttgtatatgaaattttcctaatttggatacactccctattgcaggaacttctccaagctttttgtcacctaatttcattgccatatcttcatctacaagacgaatgtcatttacactgacagggctaatgtcatcagtaaatttactttcagttacttttcccaatagttctctatatgattttgcatgaagtacaggtgtagaagttataaagggaactactacaatatacacaagcaaagctattgctattgaaaaattatatttagccattttagatgctctttcatttctatctaacatcatatctagtattcctgctacaacaaagaaaattattcctactgaaaataaagatgtaaaatctaatcttagtacaggtaatttaataaatgcataaattattacaattattaatgcaactccatatgttttaagatatcgtttcatttaatactcctctctaaaaaatgttattattattattatatccatatatttacaaaaaataaatatttatcatatttattatatattaagatatctttatatatttatagttctgcttattcaactatatttaacattatacgtgtatgtataaatactttttatacactgtttgtgctatccatcccgcacctaaaggagtgggatttttgcactattctgtattatatatatccaaaaatattataaaaatacaaatattagcagaaatttaaaaactgaagaaagtattctaactaagatttacaaattcttaatcctatcgaagttaaactactatcttcagcctaattatctagcaatatttttttatatgaaaaactctaaatcaagtttttaaatgtttgcgatttttgatacataagaatgttgtctagaattatattctgataataaaccttcatactctaaggttaagccagataaattataaaaatcatttggcgttacttcaaatgcttgtttatttaaaatgtctatctcacttttttctaacatgtcagcaacaaagtttgaacatacatatttatattcagattgtctctgaatattcattagtaaatatattaatgccattgtatcgtaatagtaatcttctctataatcactaattaattttatatttttatatagattttcatattgtaaattatctacttctaacgaatataccctacacacagtgttttttcttatagcatacaatccttgatttatattttcttcaacaaatcctccaataaatggattccttggatttagccttccaaaagaatacattggttttagattttcatttaatgatattgacacatgtgtatacagctttttacttatattccttattaagtaagataatatagttcctgtatatgttgttacaatatagactttattcatcatttccccccaatctagtaactaaatgatattatacacttacaatttaatatcataagatattctaacataataaatgtggttttacaaattttgattttaaggtactttaatattatataatataataaaaatataaatataagttttctatatttttaaccaacagatgttttcttcaaattaatcagatgatttagtatatcttgaacctttccagagtcctttaaatatcctaatgccccatttatttgtgattttaaatctatttctacttccatatccaaatcaacatttcctttttttatagatatatttttaagtgttattgggtaaagataacttttttccaaagtaatcttatttccattaacctcaaatggaacttttttattgtagttacttaatattttttctagcattttatcacttagtttaaattttccaattttcacattctcaagacttacaactaagtttccatcctttaaagtaggtctcaattcaagttcatattgactatttaccaaaccaaataccttatatggtcctgctacctttattttaccatttttcatttcaacaaaattattttcaagttcattaattccatgcttctgcatcaatgtatatattaaatttttaaactcttcctctgaaacagatatttttccaaccattctaagtggattttttactacctccatagaatttatatatgagccttttgataaatattcttcatctatgattttattattttgtgaactaacatcatatctttcttttggtgtcaagatatatacaacaattcctgcaagtactaaaacaataacaattaaacttaacaaaatctttgcaacctttcccataatcgtctcctttacaaatctgtcatcagatttaaaataaatttagataactaacttcacataatattcttaacaatatacatactataatacagtcttttaaaaattaattcaaccaatctaatgttttgtaaataaactgtaaaaacatgtttttagtataaaagttaatattttgcataatactcttaattacacctttatttttttctaatcttggattaaaattaatattatgcaatacagtgtagtgttctgtattataatcaaattaaataggaggtatagaatatgtcaaatgaaacgaactcatctaactttataaagaatattattataaacgacttagaaacaggaaaacatgacagtatcataactcgttttccacctgagccaaacggatatttacatattggtcatgcaaaaagtatatgtcttaattttggattagctaaggagtttaatggaaaagctaatttaagatttgatgatacaaacccattaaaagaggatgttgaatatgtagagtccataaaagaagatgtaaagtggttaggatttgattggaacgagttaaattttgcatctaactactttgatgaaatgtataagagagctttaatactaataaaaaagggtaaagcttatgtatgtgatttgacacaagaggaaatgagagaatatcgtggtactctaactgaaccaggaaaagaaagtcctcatagaaacagaactattgaagaaaaccttgatttatttgaaagaatgaaaaatggtgaatttaaagatggtgaaaaaacattaagagccaaaatagatatgtcttctccaaatataaaccttagagacccaattatatatagaatatctcattcaacacaccataatacaggagataaatggtgcatatatcctatgtatgcttttgctcatccaattgaagatgcaattgaaggaataactcactctatatgtactttagagtttgaagaccaaagacctctttatgattggtttgttaaagaatgtgagatggaaaatatacctagacaaatagaatttgctagacttaatataaataatactgtcatgagtaaaaggaaattaaaacaacttgtagatgagggtattgttgatggttgggatgaccctcgtgttcctacaatatccggaatcagacgtaagggatatactgcagaagcattgcgcaatttctgtagtgaaataggggtatcaaaagttaactctacggtagatagtcaaatgcttgattatttcctaagagaaaacttacaaccaaaggctcctcttactatgggagttttaagacctttaaaacttattataactaattacccagaagataagattgagatgcttgaaatagagaataatgctaaagatgaatctcaaggaaagagattagttcctttctctagagaattgtatatagaacaagatgattttatggaagaacctgttaagaaatattttagatttttcccaggaaatgaagtccgtttaaaaggtgcttattttgtaaaatgtactgatgtaattaaggatgaaaatggaaatgtagttgaaatacatggtacttatgaccctgaaactaagagtggctctggctttacaggacgtaaggtaaaatctacaatacattgggttgatgctaaatcagctataccatgtgaatttagattatttgaaccattaattcttgatgatatacctgaaaatgaaggtaaacatttcttagaacaaataaatcctaattcattggaaatattacaaggttttgttgaacctacacagataaaagattctaaaccttttgataaattccaatttgttagaaatggattctttagtatagataataaatatacaactgacgaaaaatttgtatttaatagaatagttcctctaaaaagttcttttaaaccaggtaaataatcttacaatcaaaaaatgaagacttaaaatataaattacttctactataaataaacttagttagaagtaattttttatttgagtcttcatcatttactttaaatgattaacttttttcactacagattcccataacttctattccatcttttatgcattctatgttaagaggaaaatctggtcctttttctccgtcaatatctgttataagtgaatcttcacattctatatgcacctttttagttttaaagtatagtatttcatttccattatattgatctaaataatcacctctaagcacacttatcaaaactggtattgattttggtattggcattcctttaaaaataattacatccaaatatccatcatctatttcagccttatatgctagatttatatttcctgctgttttgccattaaaaatcaacataagatacatatctccatcataatacatttcctcagaagatacttttatcttaaatttcctcatatacaatgcttcttctattccctttatataataagaaattcttccaaatgaattttttaagtctgtgtttatcctttgtgatacatctgtaaacataccagcacttgcaacatttataaagtacttattattgactttccctatgtctattttctttggttttgaatttatgatttcatttatagcttcttttatatcaaatgaaatttgaagagcatttgaaaaatcatttgcagttcctgtaggcaaaattccaattggaatttttatgtctaattctttcattgcatttactactaaatctacagtaccatctccaccagctatcaatatgtgttcataagaactatcaacttccttaaatgcattctttacaggttctttaatagttaatctatagggtatcaataaataatttttttcttgatataattctatgatagtgtctaaatttgataatatctttttttcacctgaattaggattgtatataagttttacttttttcattatttctccttactcattttattcttttagtatccaaaatcttcatttaaaaaaatcacatgtattctttctggtgttaattgtctttttataagtgtataactacagcatattcttcctggacttgaacagtctatacatataccagtagtcttacatccagtatttgtacttaatcttttacaattggctggagcagctattgtttttgttctttttatagcttcatctacatctttaactattttatttactcctgctataactattactttatcaggtccatatatcatagcagcaactctattcccattcccatctaaattgtaaagttcttcatcctctgttatcgcattagtacttgtaaaataagcatctgcagaaaatgactttctatatatttctttcatttcttctggtttgatatcttttgcatatctatcaagaaaattatatttttctcttataaaatcaatcactcctgtttcaaataaggtcatagaacctccacatcctactagagaacctactttaactatttcttcaatttttttaagaagctcttctttgttacttactaaataccctttcatattattgttttccagagattttattgttttttctattcttttttcattaagccaatttaaattttgatccattttaacttcccccttatttttaatatgtacttaattatttataaactttattgtctttataagtttattttagtacatctaaaaaaaaatacaatataaaacttaaatagttttatataattttttccaaaataacttactcaatcaaaaaaggaaagtagatgtactattctactttccctatattgtatgtagtatttattgcctaaaatctatatattaattatatgtttcatattatataatatcacagttaattaaaatgtaatactatcttctttttaaacatataaattgtattattaaatttaatatatccaacttcaataaatcttattaatttgatgaagaagatgctatagctgcacttgttgctgccattacacatgcaatttgaatagcaacaacaatatttaaaaatatattattagttatagagcctatattattctcatttcgtatcaaatctgcataaattgaagctacaatagcagaactaatcattactctattactttttcctaaagaccaatttccaaagcctttttcttctttaagtttatttgaaacattttttatctcttctattatttcatcttctctataatctaataatgaaattgctcctattattggatatccataataattcattttacaatcattttctttaaatgcttttttaagttcaatagtctttttacatttaagcatagttctatcatcactaaataaaagaatttgggataatgcttgtaaatcatttcctttataaaaaccattttcatttagaaattcataacatttttctatgtattctaaatcttcatctaaattttttgaatgaattgcaataagtgctatattacaatagtcatcactagaagttagaaatggatgttttttcctcatgtaatcatatattattttcatttttgatatacatgtaagataatccattttctctctattttcataaactattgatgctgtaagtggtaaatatgtatcgccccaaaacttttcacttttaagttctttgtatatatctaaaatcatcttaaaactactttctggatttgattcaaacgaaagtagtgttgccatataaaacatattatatcctctaaaattagagaataatccagtattttttttaataagctctattcgttcttccactaatctaggacttattctcttgttcttaagagtaaatgcaagtgcacaactatgttgtatcaatcccatttgccaagaacctttaacttcatttaatgctttgtaattttctattaataagtttacttttccatttataaacgattgttccatattgccctcctagtaatatatctcattgtactaatagttttatatttattatatatatattaaatactacaatcaatacatattacttcaaagaacatcattcttcaacaataatgtagccttttttgtaatgtcttcccatattattgactctatcatagtactctgattcactttcattactccatttgggcacaaatacatctattgcattagaattactaaaatacttactagaccccctatccataacagtttttaattttccatctacaataatcttagttccaaaactcaagtgattgtttgctacaaaaccatcttctaaatcatctcctgtagcagttatcgctccatatccattttcttgattaagacttgtgtaataactaacttcaaaagttataggtactaacttctttattttaatacctaactgattttgtagtttctccttttgtactttcaacttatactcatcactatttttataatcttccataccttgattatacttggaattaaagcttttacctgactttactatagtatctatatttactatagattctttacaatgatctgcatctatttttgtttctccatttaccaataatggagttaaacatacactacatacaacacatgtaatcaatgcttctttaagcttcataaattccccccttattattttgatatattagcatatttaatattatatgtctatatttagatttaaataccacacccatttgctttaagaagttgtcttatatttaattcaccttaaacacttataaatcctctatcttagaatcatatagaataaagcttttatcgttaaatattttttattaatcttttaaaatctaaagctactttatttaattttctcttttttagaatttaagaattaaaattctataattttaaaacatattgaatttatttttttgagatgatataattttcttaagaggtggttgatatgataaaaaatacaaaacaaattacagtagaagttaatgaaattttattacaagaaatatctaagataactaatgacgaaaataatattttgacagatttgataaatgaatcaattgtaaattatattcttgaaaacaaaaaacataacattgaaaataaagatttagaagaagtgattaaattttacaaaaaagaaaatactgaaaaacctaaaagtgcagcaagagctatagctgaagcaaaaactcataccctgtattaatcaaataaaaaagttcctaaaaactaggaacttttttatattaataattattaatatatctcaatatttatctcaaatttatcaatataagcatgtttaatacaatctattgtatacttatcttaccctagaaataatcaaaacaaaaattatgccctttatatctaacaattaatttacatgattaatatacaaaaattctgacttttaaattcgtatacaatatcaaactaaaataatactaatgacaaacccaatataaattaaattcaaacaggtttgattttacatcaaacttattgtattaatattaaataacaagacaaaatatttataaaaattacaaattttacataaaactttatattttattcatttaactaattattgtaaaaactatttattttatgataattaactacaccaaattattcatcttttttaatatctttaacccatttttcaacagagttcaattcttcttcatttaccccctttttgaacaaggatttcataaaactctcaatagaacttccatgcatattatctaaaaaagtttttgtttcaaaatgtaaatactcttcttctccaataagaactgtataatgtgtatgtctatcaatctttcttgcacttaagaattgcttatttactaatcttgataaaagtgttagtgttgtagtttgcttccaattatatagtttttccatagcttcaatgacatcttttgatgctactgtaaaatctgaactccaaataaatttcatgacttttaattctgctggtggtatcttagtaatagtcatatgattttacactcctctcaaacttctacataattaaatactatattaatagacttttcgagtcaaaggttttatttaaaatatctcatccaaatttattaatacaaaaaatttatatttttattcaaaattaaacacacaatctattaatataaagataaatatctattctataagtataacagattatcaaattaaaattctaatatttgacataatatatacattttttaaataaatatatacaatgtattaaaatgtatgcaactctatttcaaaattattttgtgatatatatatgttataataaatgtataaaattttgattggtgggttatatatgaatgcatttattagaaaaagaaataaaaactatgttgtttacctggaatttgaagatgaaaagacaggtaaaagaaaacaaaaaaatatgggtacttttgataaaaaaagggaagcaagtaaaagactaaatgaggtaaaagaaagcttatataatgatggttttttagtaccaagcgaaattacagtgtcagaatttctattagattttctaaataaatatagtgaaaatatatctttagctacatataataattatgttagtatttgtaaaaattacattaatccatctattggaaaatataaaatacaagacttacatccggttcacatacaaaactacatagataaactatcttataaactaaatcctcaatcaattaagattcatataaatatattgaaacttgcaataaaaagagcttatagactcaaattaataaaagaaaatgttatggatagtatagaggctccaagatataaaaaatttaaaaatgagatttatgatagagaacaaatgataaaattattagatttagcaaaaaatacagaaatggaattacctattaatttggctattggattaggtcttagaatttcagaagttttaggtctaacttgggataatattgattttgaagaaaatacaataacagtaaataagataacttcccgaattaatggttctgttattctcaaagagccaaagacagaaagctctgttagaaaaatatcttctcccaaagaattaatgtctttattaaaagaatataaaataaaacagaataaaaatttattaaaatcttccattagaaataataataatttgttgtttttcaataagaaatgtgaacctattgctgaagatgttatgagtaaaaaatttaaaagatttttagaaaagaatgaattacctcatattagattccatgatttaagacactcacatgttactttacttataaattctaaagtacctataaaggttatatccgagagagtaggacactcaaatataagtactactctaagcgtttattctcatgtacttaaagaaatggataaagaggcttctgacaaaatttctgaaagtttatttaatgctaattaatattaatttatcttagctttaaattagcttagcttattgagatagattcattaatattaaatgtatctatctcaaattaataactacttaaataatctgttttattttaatttatcgcctcagttattatacttttttatgaaaaattatactttacaataaaaaagatatttccttatagaaagtatctttttaaatactattttattatatacttgctaacattggaatatctaacatcttcttcattacatcatctactttttttgctttatattcattgtatccaattaaatatcctttttcatatgaactttttaaaatctctttttcatataaattatcagatttggcttctgtgacacttaaattataaagccctttacacccatcttcataacctttattataccctttttctgcaaaatagtttttatgatttttttcgttatgtactgaagatattgttactccagaattttcttttgtactagcataaggacaaaaacctttatttggttgatgtgctgaatgtcctccacaataataacgtgttaactctgatttatttttattatgatgacctcctgatgaattatgccctcctgagtgagcatatgaaaaattccctacactaatcatagctaaactcaatactacagctactaaccttttcttaaccataatctattccccccaaaatgttatatatttttattatatcatctactatattatatttaaattcttaatatacaaaatattactcgattctgctaataaacatatttaaacaacataaaaaacctcctaatatttgattaaaaatttacacactcatgcatagcatgtatcaaatattaaaaggttttatactaataattatttatcttttccatacattttagctaattggtcttgtatctctttactttctaaatactcatcaaagtccatttttctatccattattccatttggagttatctctataattctatttgctatagtagatataaattcatggtcatgagaagtaaataaaagcactcctgggaacttttcaagtcctttatttacagaagttatactttctaggtctaagtggttagtagggtcatctaatacaagtacatttgcatttgaaagcattagcttactaagcatacatctaaccttttctcctccagatataacttgagcttcttttaatgcttcttcacctgagaataacattctacctaaaaatcctcttataaaactttcacttttttcttcagagaactgtctaagccagtcaaccaaagaatattctactccgtcaaaaaacttattatgattttttggaagataatcttgagaagtagttactccccatttatactctccactgtctggttcaagttctcccataactatgttgaaaagtgcagtagtagctatttcatctcccataaatactactttatcatctctatccaatctaaatgacacattatcaagaaccttaaccccatctatagttttagttaaattgtgtacttctaaaacttcattcccaatttctcttgcaggtgtaaatcctacatatggatatcttcttcttgatggttgtatatcttcaacttctaatttctctaactgtttctttcttgatgttgcttgtttagcctttgaagcattagaactaaatctagctataaattcctttaattgagctatcttttcttcagtctttttattttggtccttagccagttgtaaagccaattgacttgactcataccagaaatcatagtttccaacgtacatttgtattttaccaaaatctacgtcaactatattagtacatatttgatttaggaaatgtctatcatgtgatactattataactatagactcttctaaatccattataaaattatttaaccagtttattgatttaaaatctaagtggtttgtaggttcgtccattaatagtatttcaggcttaccaaaaagtgattgtgctaacaataccttaaccttttccccaccaactagttccttcatttgtttgtaatgcatatctttcgttatgccaagacccataagtattttctcagcattagtttctgcatcccatccgtcaagctctgcaaactcaccttcaagttcggcagcttttatcccatcttcttcattaaagtcttccttcatatacaatgcatctttttctttcattatgttccaaagtctctcatgacctcttataacaacatttaaaacagtttcttcttcatattcaaagtggtcctgttttaaaactgacattctttctttatcagttatagatatactacctgtattaggctctatttctcctgataatatttttaaaaaagtagattttcccgcaccattagctcctattattccatagcaattacctttagtgaattttaagttaacatctttaaatagttccttatcaccaaatctaagtccaacacctgtaacttgtaacattaatatattttcctttctttttgctcataatttattttatcataaaactttgataacatttttattatatattatcacgtaaatagtatattttttatactaaatttgtgaaatatttattaaaataatactaaaaattgtaaatttataaaaattaacaatctcttatattatacttataaagaaatcaaattgcaactttattcattcttttacacattgaaaataagttattataatttctaaataaatatgcttttcttaaaacatcattctagctgttttgtttcatatttaaaaagagtacttaatttgtaaatactcttttttaataactttatattttagcaaaattacatgcaggataagtacatacatcacagttcatacaaaggccaccatgaccatatctagctatatcatacttatcaagcttttcatcaattaaaaccctagataaaactatatcaaatactgtagttttatgatacattgcgcatcctggtatacccataattggaacttctccataataagcaagtaaaaacatagctcctggtaatattggtgaaccatatgtcactaaatcagctccagtttcttttatagctgttggcgtaacatcatctgggtctacactcatcccgccagtacaacagataagttctgctccttgacttataaattcttttattgcactctttataatttctttatcatctgggcatatagtctgtcctataacttcacaaccaaagccttttactttttcttctattactggtccaaatttatcaacaattctgctataaaacacttcatttcctgtagtaacaattcctactttcttaggtttaaaaggtactacatttactatttttctattaccaactactttttttgcatcttctaattttttctcatctataaccaaaggtatcactcttgttccagctacttttaaacctttatttactataaaattattatgaagagtagccatcattatttctccaacacaattcaaatcaaaaagtgcatcaacatctatctttaatagaccatcacatgctgctataaaatctatttttccttcttttatttcactaaaatctaaattttctccagcagttagttcttttaaaaacaatgcgccttcattttcatgaaccattccttctgacttttcccatacatacaaattatctttaccaagagataataacactggaatatcttcttcttttactatgtgaccctttttaaattttcttcctttaaattctccaggtattatttgagttatgtcgtgacataaaacttgtccaacagcatctatagtttttattagcttcataatttacccccgattctctcatagtccatttttgtatcgatatcaaataacatttctttaggaacttctacatactttatttttgatgaattttttaaaatggttttacctttttcatcttctttaagtgccaacaattcttctttcttactatatgggaatatgactggatttccacacatatctttgtatcttggaattactataaaatctctatctaatttaaaagtatttataattttatctatatataagttatcaataaatggctggtctcctacaaagaacatataaccatcacattttgagctatttaaaactcctaattttatagattcactttgacctatatttgcatttttattatctatatattcaaaaccatatttattacacaataacaaaacctcttcatattgacttactactacaacttgatgaaaatcaatcttgctaacttctctaaatacatgttctattatagaacagcctttataatttaataaaagtttatttgctcccattcttctggcaaagcctgatgccattatcactgcatttatcatatatatcatccttggtatttataatatattgatagttctatgatttttataatatctctattgatattatctatatatataatatcatataaactattttaatacttcaatatcttacacaaaatttttgttttacgcttccataaaatatctctatttcactttcatattctttaatattttctattaattttatagctaaatttttatatttttcattttcaactttattaataaataatactctttttccagaataatttttaaataatccatttggatttaatactatattttttaagttttcaatacttactgtagaactactattaatactacttgtatctaaatttgctatttttttaaatatttctactctatgtatattctcttcattaatattcattccaaatgatgttatatctaatatccctatggtttttgtagttttatgatatactactggttctttagcattccaacctttaagtttttttctctttgagccatctccctctattaaaactaaatcaaattggtctacaatttcatccaaaatagaggaatcaatacttactaatttattttcattatttatataactgccacagactgttattccatgacaaatagatggaataacagttccatctattgtaataattatattgtcataatcgtttggtacatatattttagttgttgttgtaagaagaactttcaatttatctctataaaaatttgcaaaatagtttataaacgaagtttttcctcctgctccaactacagttattatttcattcttttctattatatttgatagttccacactttcacctcttataaccagttttctaatctcttaattattatagttagacctttttagtaaaagtgatttttgaaattccataaactcgaaagtaaatagattctgttgtaaacaacaaggcggatccaattcgccgctaagctgtaagcttacgctatcagtttatcttttaaatataattaagatattcttactctctgtggttgctttaatatttgaggattattctgtaaattagataaattaactacttgtgatttttttagtatattaagactcgcatttacatctgcatttataatgattccaacactggatttgtactgtccacgtgttattctttcccctttaaagtcatattttttaacattgtccacattgatatcaggtagaaaatcatcagcaaaaaaatcagacttactagtatagctttcttcttgcctaataaaattgatattttttattttacatagatattctaattttccttttatctctccaaatgggattcttataaaatttctatatatttttctctccatattatcacttttttctaacttagcattatatcctacaattaaatttccaatattattttttacacaataatcaattatataaaaacaggttttatttacatagtctttaacttgattatttctcttattccaaactttaaattgttttcttgttattgcagttatattcttttttaattttaaggattctattttatcattctgtttgtttgcccactgattcacagattttagcctttttccatctatgataaaactatcacctaaattggtaacacatgtacataaattttctaaacccaagtctatagctagtgcatttttttgatttgaaacttcctctgatttcggtatttcataacaatactgaatttcaaagaacctagctttatgtttaggtattattcttatttctttaatttttttctctagtatattttgtggaacttttatacttactttcccatatagttttttaaatgctggagacataggtacatttaaaatcccatcttctttgattcttatttgacctattattatgctaaaaaatccttctttatctaaatatttaggtgattttatccctctaaagtcatatttcccttctttggctaatttaattaacccaaaaaatgacctaaacgaactgtctacttcttttaatatttgttgcgctatattactattgagaagcttatagttctcattttctttgcatacatgataattagcttcatagttaagatgttctccttgattgaaataatgctgtcttacattatatgtaccaacattatataagttcttagctaagaagcacatctctcgtagagcttgatattcttttttagttaagttttttaattgttgtctctgagttccatagtgtatattttttattctgtttgacatgaactcacctcctttagaatatactctactagacattatatacggtatttttacaaaacaccatatataatgtccatttaattactttattttacaaaataatttaaatttacttgcttttatacaccttattatttattataattgtttattattatttttcatacccatataaactttttcaaaagtcataggaagctctcttaaacgaactcctgtagcattaaatattgcatttgctatagctggcgctggtgtatgtataactatttctcctaatgatttagcaccataaggacctcctgggtcgaaattctcagcaaaatctaccaatatatttccaacttctttttttgtaggaactttatactgtaggaaactatctgttaataatctcccatctttatcaaatatagggtcttcatacattgcaaaccctatacccatcatcacaccaccttctacttgtattctagctaaagttggatttataactgttccacaatcaggtacacatgcaaaatttatgaccttatattcgcctgtatttttatctaattctatctctgcaaatcctgctataaatggttttatttttttcaacatgccaaaagattctgttgcttccaaaactactggtacatcatcactagcaaatcctattcctccaacagattctctacccaattcctctaatagaacaaacttgctattatcgtttttaacaaaaaccctgtcttttcccaactctaaatcttcttttttaaatcctagctttgactctgcaactgaaagtaatatatcttttaatttatttgctgtctttattgttgcatttcctgtaaccgttgttgtacaagaagcaaatgctcctgtatcatagggacataaatctgaatcacctgtataaatagaaattctatctacagtagtatttaaagcttccgcagcaatttgagcttgaattgtatcagccccttgacctaagtcagcaagaccagataatagtttatatgtgccatcttcatccattcttatagtgactgttgccatatctacacgcggtataccagaaccatgatttgctactgccatacctactgctcttactttgttgtttcctatatctttacatggatatttatcatcccaattgattaatttcttgcccttttctatacattgtctcagctcacaacttaatatttcgtcttcagctgcttttccattggtatacctatctattatatttttaattctaaattcaagtgggtccattccaatcttatgtgccaattcatcaatagcactatctattgcaaatattccctgtgtagcaccataccctctaagtgctcctgctggtaacctattagtatatactgttctagcattaaatctaacagcatcaatatcattatatattggtaaggtattgtgtccagattcggaagaaacagagacaccattcccaccataagcacctgtattgtttaatgactttagctctattgcttttaaatttccttctttatctgcaccaactttaacatcaaaaaacatttcatgtctactattagaacctacaaaagtttcacttcttgtaaatacaaattttgctggtctaccagttttcatagtaacaaatgcagtaaatatatctgttgctgctatattctttcctccaaatccaccacctattctaggtttaattactcttatttttgaagatggtatacccaatacttttctaattattctctttacattgtgtggtgattgtaatgatgaaactacaacaattctatcatttatatctttatatgaatatgacctatgagtttccatcatgcaatgcgattgactttgggttttgtatgaagattcagccacaaaatcactttctttaagcttagcttcaacatctccaaattcaaaaaattcttttgatactatattattttttgcatccaatccaaaagggtatggctctactatgtctttttctggatgtataacaacttcatttccttctgcttctcttgcatcaaacacaggctttaaaacctcataatctacctttatcatttttaaggctttaagtgctgttttctcatcttcagcagccactaaagctacttcatctccaataaatctaactgtatcttcaagtaaaactctatcataaggtgatgcttctggttctgtttgacctggcacacaatatctgacctgtggtacatctttatacgtataaatacccacaacccctggaattttttcggcttttgatgtatctatattctttatcttagcatgagcatgtggacttctaagtagttttaatgtcaaaacatctttatgcataatgaggtcttcagtatatagaggttttcctgtgacaattgctgtactatctatctttcttatccccttattaatcattatacattccctcctcaatagcattatacatccttttaactaatgcacttgccatatcctttctgtactctttactagctctcatattacttccataagtaagttccttactagcaacaatagatgccttatctatatctttttctttatttaatatattactcgcttcaagtgctaatctagctttttgaggtcttgccccaattgctattttgtaagtatcattttcttttagcattgctgaatttaatacagaaaaatctcctgtgcattttcttattgagtcaaaaacagctatcgcatctttttttggtagtattacttcgaccaatatatccctacttaattcactatccaaaaactcacttaactctagtattcctttattgtataatctcaccttcgctccaacaaccaaaagcgctggtattaagtcagaaaagccatactttgaaaatacacttgcaccaattctagccccttgtctaaattgaacaccaactatattagaaacagcgcttgaaagtattccactacagtaattttttatagttttatcaatttctaaacttctaagtgaagtatctgcacctatcaaaatatttttttcatcctcttttatataatttagatttatatcttttaaatctatcgctgttcctatatttttattacttaattttataaatccacatccacctaaaataacattattttttttagaaattaaaattttatatgcttcttctaaactctgtggaattgaatattcctttatagtaaccatcttatcccccatcattaacttattaaaacacaaaagtttttaataaatcttttatttatatttataattgtagtatatttaattcacatatattaaacctttacattataaacttttatttttatcctcaaccttatcacttttatttccaggaaattttaccatatataaagcttgaattattatggctaccattgctcctgaaactacacttgaatctgcaagtaatgtctctataaattttggaaatttttcaagaacttgaggagctaccatgaatccaataccagaagccatagaaagacctaatatcatgctattttcttgattaaatccatccatactaacaagtcttaaaccagatgttgtaagagttgaaaatataacgagtgttgctcctccaaccacacagggaggaattgttcttattaaattagctaataaaggcgatattcctgccaaaaataatccaattcctccaatagctagtacaaatttacttacaacctttgtattggaaacgattgcagaattttgtccaaacatccccattggagttgcagaaaataatgcacctattgtagagagtactccatttcctaaaacagcagaagaaagttcttcatctgttacttgtctattaagccctcctaccgcagaaagtgtacaagcacccattatatcagctatctcaactaaatatattattgaaaacattacaacaacttcaagtcttatatctagcccaaaagcaagtggttttggaagcgcaaccaaagtaaactcctgaattgaagaaaaatttactatacccaaaattaatgataaaatgtatccaaaaattatgctaactaatattgatgcatctttaaataatccttttccatacttatttaatcctaatatcataagagatacagatattccaactataaaattaattggattcccaaaagtctcattgcccatacccccagctaagttttttatagctattggaaaaagtccaagacccatacatgcaactattgttcctgatacagctggagtaaatataaatcgtatttttttaagaccaaaaccaattataattattactataccagctattatttgagagccaaataatactggtagtccatacttacttgcaacagataccccagctcctataaacatagctgtagctcccattataactggtattcctcctcctaatttaaaacctttaaacaaaggtattggatataattgtaataaagttgataatcctgcaaaaactaatgcggcttgaatcaataatgttgacatcttatgattaagtccagatgcatttgcaatcaatatcgctggtaaacaactacctattaccattgccattaagtgttgtaaccctaaaggtattgcttcctttagtggtggtattccgtctaattcaaattttgatgtactttttgctttcataataaaaactcccgttacataaaacttattgaattatataaatacttaaaaatctaatatattaaattaatgatgttcataaatatcaactatactccaacatatatttaagtttttagtcttaaaaaacagatgcaataaatttaattattaacaaatacacgtattctttaattttgtatacattatataccatgctttacaaatataagagtattatagctatgaatttttaattttttatagtaaatttaattcaatttaaatctttcaatcttaatcattataagttataagttttcataagtatttacatgtttcaagttttaaacatttacctataaacgctactttatagatgtcacttcaaatctagtgacctcatactttcatatgagcgtagactatttcttcatcttcagcattacctgctaagagcaacccgtttccactatcaatcgcttatagtgtactctctctcgagatagtcgtttgaccttcctatttctaggcttggcgaccaaatgtccatttttaagtacttaggctctcaccatataccatcctcactattgtttctggttttcaccacattcataaaagtttctttctatcttttattgtagttgcaaggctttaggatttactggttttaaagttgtgtcctacatagatttctctatgtacggggccaaaagtacaatttatttaacatactttgctttaccccctgtaaataatattatttactctttcactgtttttgttattaaattaattaaatatcaattaatctaagcataaaataattatttaatttaaactcaaaatatttatgaatattttataatataattctcataagacagaaaaacttaataagctatgtatctcagttgtaccaatgtactctcctttactatatttgtatctgcaacataaaatatacaagtttctatctatttatagatatatatatctataagcaaaatagtaatattatttttatagtaaaaattttattcatattactatttataatttttatagagcaattttagtgccaatatttgcatacatttgtatagtataaaatttttatgttctcattgataaaattttacttatttcaagcgttttattcgattttatcatctaaattttaggttttatttttataaattaattgtatttacataaaaaaaaagacctaaaaacaaatttttaacggtcttttctcaattttttattttcatttctaaaatttataataaatagtaagaacactataaattcttttatataaaattcttagtttgtggatgataaattagtgaattaaaatactactttactgattttagtttgacaatatcactccaatttttactagtggctaactctactaaatttaagtctcttcttatttcagctatatcctcttttatagaattagtgtcaccttttatatatgctatgttatgttctatattatcatgagtagctttatttatttcagaattatgtaataaacttcctaaaatattattctgttctatctgtatctctttcattgatttatcttcacattctagactatcaatcttaatttcaattccatataatttttcatttgctatggatacctcgtccttaattccattcatatcttcattaatgttatttattttattttgcataaagtttacttctgatttaacttcggaaacatcttctttcattacagttatttcttgtcttacttctgacatgtcttttttcattacatttatctcttgttttacctctgatgtatcttctttcattacagtcatttcttgtcttacttcagacatatcttctttcattatatttatctcttgtcttacttcggacatatcttcttttaatacatttatctcctgttttacttccgacatatcttctttcattacagtcatttcttgtcttacttcggatatatcctctttcattatatttatctcttgtcttacctctgacatatcttctttcattacagtcatttcctgttttacttccgacatatcttctttcattacagtcatttcctgttttacttccgacatatcttctttcattacaatcatttcctgttttacttccgacatatcttcttttaatacatttatttcctgttttacttccgacatatcttctttcattacagtcatttcttgttttacttccgacatatctccttttaatacatttatctcctgttttacttccgacatatcttctttcattacagtcatttcttgttttacttctgatatatcttctttcattacagtcatttcttgttttacttccgacatatcattttttatgctaactacatcttcatttatagtatataataactctaaaatcttctcttgcacttgcatcaccatccctattaattattataacattttacacaaatgctatacaatgttaacatatatatcagaattattaaaattttaattaaacaaaattgattcactttattacttcaaaactaattaatatctaaaataactacaaataaacaaaaataaggtcaacaacaaaaaaggcttatctctttgagatagcctttcttatttttatttaaaactttgttttttataaaataatctatacattcagctctgaacatgaaatttttcttccaagtgcttttggtttacaaactgatatacaaagtccacaatatctacactcttcttcattcaattccatcttatcattcaattttctcgcttgatatgcacaaactctctcgcacatcttacatttagtacatttttcttcatcataagtaaactcaaagctaagtctttcattaacatctcccatatgattatgtactataccacaagcattttctatagtattatatcctaatctattaagattagattttaaatcatcatgtattttagatattacttgtgcgccttttaaaattactactgaacatataccaacaaagtcagcacctgccataatcatttctaaggcatcatctccacttacacatccacctaagccaattattggtatattaacttgtttttttatttcatatattctctgtaaagttattggcttaatagtttctccacttaaatatcctattccatttccacctaataaaggttgccctgtttctatgtctattctaaatgctggtcctacagagtcacaagcagttattgcatctgctcctgcttcttctaattttttagcaaaatcgcctatctcatctatcataggaggaagtttaactattacaggtatatttactctttcctttgcatctttaagcattggtatcaaatctctatagtcataagatactaattcaataaagtcagctcctgcatttgcaactttctctactaattcgctactttcttcaattgtatgacctactgaagctatacagacagtcccatctcttttcatttgtggtatttcaaaatctatccattgctctggctcaaaatctgtccatttttcattatttaaaagagcattagctgtatttctaaccatatgtggtgctggatttatagctctttcttttcttatagtcttagtcacaactgcccctgctcctgcatcacttaatatcttgcatccagctgcactatatgttaatggtcctgaacctattataagtggtgattttaattctttacctaaaaaattatacattatctgcttccccttttcatatatatttacattcgttaaaatttccaaaattcacaagcaacttctttcatttctttaacaatagcttttttatctaaatcaactaactgtttttcttttaaaatatgtctaccatctatgtatacatttgatataaattcttttttaccctgaactactatctggtcaaatatattatcaagagtcacaggagttttaaattcatcttccataactattatatcagccttattaccaactgctattttaccagaattttgaagtcctaatacataagcaccatgctctgttgccatcctaaatactaaatttgctggcattactgatgcatcttcttcaactgatttatgcattaaaaatgcacctctcataacttcaaaaaaatcatttatatatccatcagtacccagtgccacttttatgccttttttaatcatttttggtactggagaaaaacctccacctacttcacagttgctaagaggcatatgaaccacttttacacctttttcttttaatatatctatttcttcatcatttacttttacacactgagatgctaatacagtttcatccaatatatctaaatcattatagtagtcaactgcttttttgccaaaatgtttttcagcatagtttggctcatatatactctcacataaatgaaattgcattggtgcatttaatttttttgcatcttctttagctttcttaataaatctatcagaacatgtgaagcttgtatgtgtacacattattccatttattaatttactattttctctactccactttattaaattagaattttcatctaaacatctaagtccattttcaaagcttattctttcacaactttctaaggataaaatcgctttcatgcctatttcttctagtatttttccttgctcaattaaagttccttcttctgtatttggagcttctagggtatcacaaaaagctaccacaccagattctataagttctattgctgatgctttagttgttgccttcacttctttcaatccaattctattttctataaatggccaccaatagtcatttaaaaaaccttcaaagtcagtaaaatgtacatttgccggtattcccctagaaagaactccatattgatgcatatgaccattgacgaatcctggcattattatagcatctgatttatctattatttcttcaatatttttatattttatttcaacttcttcatttggcaatatatcttttataatgtcattttctactacagcagcagaatttgtatatatttcatcagcagaagatattaagtatttacttttaatagcaatcatttatttacctccctgatttaattttttcatggccatataaactttctcagaagttataggaagttctcttatacgaactcctgtggcattgtatattgcatttgctattgctggtgcaggtgtatgaataactatttctcctaaagatttagctccatatggacctgttggctcataattatctacaaaatcaacaattatgtttcctatatctttttttgttggaactttgtattgtaatagattagaagtttgaagctttccatcagaaccatgtctagggtcttcatacattgcaagccctataccttgagttacaccaccttcaacttgtattctagcaagtgcaggattcataactgtaccacaatctgtagaacaagcataatttattactttaaactcccctgttgttttatctaactctatttcagcaaatcctgctaagaatggtttagcactctcttgtataccataagattcagatgaatataaaacttcttgatttccaccaccaacagattcttttcctaattcacttaacaaaacaaacttctctacatcttcactataacaaactctgtcttcatatagtattaaatcatctattggtaaatcgagtttcttctgtgctacttttaatatcttttgttttaaactttcagcagattttattgtagcatttccagttacataagtagtacaagaagcgtatgcaccagtatcatatggacacatatctgtatctcctgtataaacggaaattctatcaatagatgtattcaatgcttttgcagctatttgtgcaagtattgtgtcagaaccagttcctaagtctgaagacccagaaaacaacttataagttccatcttcatccatcctcatatttactattgccatgtctatgttggctataccagaaccatgagttcccacagacattccaacagccctcaccttattgtttccaatatccctaacagggtacttttcatcccatccaataagttttttacctctaattatacattcatcaagtgcacaacttcttattggaaaattcattattccgccttcagtttgtttttttataatattctttaactttatttctgttgggtccatattaagtttatgcgctaattcatcaattgcacaatcaagtgcaaatgtaccttgtgttgctccatatcctcttaatgctcctcctggaactaaattagtatatacagttctcccatcaaattttattgcaggtacattattatatgttggaagtacattatgacctgattcagagcaaactgaaggtccattatcaccataagcgcctgtattattcaatgctttcatatctatagcttttatgtttccttctttatctgccccaatttttatatcaaaaaacatctgatgtctagtattagtcattgcaaaagtttcttctctagtataaattagttttgctggtctttttgtcatccaagttacaaatgatgcatatatctctgttacagctatgttttttccaccaaaacctccacctattcttggttttattactctaacttttgaaagaggtattcccagtgctttagaaacctgtcttctcatatgataagctgattggtttgcagaagttactactaatctgccattcgtatctatatacgtataagctctatgagtttccatcatacaatgggcttgtgattgagtcatataagaatgttctactattacatcactttctttaaactctttttctacatcccctttacccattttttctctcgatacaatattttttgtagcatccaatccaaaatcaaatggacaaaacaaatcatcttcttcatggattaaaattttatttccttccgattctcttgcatccaatataggagtcattacttcatattcaacttttataagtttcatagctttaatagcagccctttcatcttcagcggctattatagcaacttcatctcctacatatctaactacgtcttcaagtattaattggtcatgaggtgatgcttctggatatgactctccaaccattgaatatctataatttggaacatctttgtaagtgaatatgtttactacaccttttacctttaatgcattttttgtatctatgttttttatcttcgcaaaagcatgcggacttctaagaagcttaattgttaaaacatctttatgaaaaattaaatcttctgtatatattggttttccagtaacaatggcttcactatctatttttcttacctctttatttaccatcacactcacctccaatactattatacattctcactactaaggcttttgccatatcttttctgtattctttacttcctcttatattacttccaaatgaaagttcttcacttgatacttcaccagctttttctatatcattttctaaacttaatatttcacttgctttataggcaatttttgctcttcttggtctagcgcctatcgcaattttataaatacttccttcttttaacattgctccatttaatactgcaaaatcacctgtacattttcttatagaatcaaatacacctatagcatcttttttaggtaatataacttctattaatatatctttttcaagctcactttctaaaaaatcagctaagttcataaccccttttttatataacttaacctttgcatctaccactagtaatgaaggtattaaatctgaaaatccatacttagcaaatacgctagctcctactctggctccacttctaaattgaactcctactatattagaaacagcgtttgaaattaccccattacagtaatttttaataaccttatttaattctaaagttcttaaacttgtgtctgctccaattaatatgctatcatcagtttcatttatataatctaaagctaagtcttttaaatctattgctgagccaatatttttactacctagttttaaaaatccacatcctccaagtattatgttgttttttcttgatattagcagttcataagcttcatctaaactttttggaactacatattcctttatagttatcatactctctccccatatcaacttaattttcacttaaaagtctaagtgtttaaatatttatgtattgctcttaattgacctttatatcctgtacatctacaaaggttaccatttacataatctataacttcttcttctgttggattttgaagctctcttttcattgccaaaaccatcattataaatccaggagcacaaaatccacactggtcagccccttcgtctgcaagaaaatctccaaacttctttgcttcatccaagaccccctcaagtgttgtaatatgctgaccatctactctagcagtaagataattacatgaaagcacggccttgtcatttaccatcactgtacataacccacatgagcctgtatcacacccttttttaacacttacatatccattttctcttaatgtatctgctaaaaaatcatctggtcttatacttaattctttttctttattatttatggtacatttgataatcaaataaatcacctcaaaactcatatttttaagctaaagttttactatacttttctatgaataaattacatttattaataaaggctattccatttatgaccttccattctattttttatagttcctcttacacaaagtctctcagctgtatcttgagcatcttttaatgctttctcttcattagctgtcaatatttttgaatcttccattattatatttccatctactataacactctctatatttttcatactagaagaatatactaatgtagataccggattatgcataggtatcgcttttggtgaaagcattggattaaatattagtaagtctgcttttttacctatctccaatgaacctatctcatcttccattccaatagctcttgctccatctatagttgccaactcaagaactttttctgccgacattgctaatgggtcacacttattaactttatgttgaagtgctgttaatttcataagttcaagcatatcttgagagttattactagcggctccatctactcctaaactaactgttattccttttttaagcatttctggcactggtgcaacacctgaagataagtacatattacttgctgtattatgagacactttcatatcgtattttttagtaagttccatatctttttcagttagatacacacaatgtaccataagcacatttggtccaagtattcctaatttttctaaaacatctatgtcatattgcccatgcaattcttttgctgcttctctatcaaaaggagtctctgatatatgtactgtaaataaagcatcatcatattcttttaccactctccatagcatttcaagcatttcttgagaatttgaccatattgctgcaggagctactcctattttgattcttccattttctgtattatggtgtttttcaaacaatcttcttacatctttttcaaccgtttctacatcttgcattattccaggatgaactccaaattgagctcctgtattcatacatcctcttccaagtattcctcttattcctaattctttataagcatctattattccatcacaaagacctggcttactatgaggatacatgtagtcaaccatggtcgttataccacttctaagtccttcaatacatccaagcattgcagcatcataagtatcttttggctctaaatagttagctgctggaaatgtcatagtttctaaccagtctttaagtaccatatcatctcccaatccttttaataaagtttggaataaatgattatgtgtatttataaaacctgggaataaaactttacctttagcatctataatttttttaacatcagtatatttactttctatctctttagaatttccaatatcagcaatcttgttatcttttactactaatgccccatcaaaaataacttctctctctttattcacagttactattatggcattcttaataagtatatccatcattcttatttccccccgcattatttagtaatttttcttttaatatattgacctgttggatgttctttaacattacaactttgtactacatgatttcctctcaaaaatacatcttcaactttacatttaaccttaaatccttcatatggagtataatctacattttgtttttgagttttataactaattgtttcttctttattgatatttaaaatgactatatctgcatcacttcctacagctatctcaccttttttaggatacattccaaatatttttgcagcattcgtagaagtaacttccacaaacttatttacacttattctattttctaagaccccatatgtatataaaagtgctaacctatgttcaacaccaggtgctccatttggtatcttactaaaatcatcaattcccaagtctttttgccccttaaaattaaatgaacagtggtctgtgccaactgtttgaatatctccactagacaatccttcccaaaggtaatttatgtcttctttttttcttaaaggaggagacattacatacttagcaccctcaaatttattcttattatataaattgtcttctaataatagatactgtgggcatgtttctactatcatatctatatttttttctctagccatttttacagtttcaagtgactccctacaacttaagtggactacataggattttgaattagataatttagttatatcagcaagtcttgaaacagactctttctcaactatgttaggtcttgtaagtggatgatattttggctctaaattaccattttgtatattttcttctatcaatacatctagtaaatccccattttcacaatgaaatccaactatacaacctaaatcccttgctttctttaaaaccctgtatattgttccatcatctactttcatgccatcatatgccatatacatcttaaaagatactatcccatccgaaataagtttttccatatgattaaatgtatctttatttaaacatgtaattgtcatatgaaaaccataatcacaataacaatttccacttgcttttttatgatatgcttctacaccttgcagtaggttttccccctcattggcttctgcaaaatctagtattgtagtagttcctccagctatagctgctcttgttcctgtttcaaaattatctgcagttgtaatagaacctgcattcatatcaaaatgagtatgtgtgtctattccaccaggaattacaattttacctgtagcatcaataaccttatcaccatttatttctaagttatttcctatttcaactatcttttcatcttctatccttaaatcacttatataagtcttatcagaggtaattatagttccacctcttagtattgttcccatatatacctcctaacttttaagctttaaagtattttctaagtatcgtaaaactttatttaaaattgtattttctaaaggtgctatattcagcacctctagactatatttaaataatttattgtgaactaaatattattttccgtatacagattttaatattccatagtaaccttctgttcctataaataactgttcttgctctatatactcatctattgtgtgagcaagattttccttagaaggaccaaatcctatagtttttattccagcttcacctgcatagtgacttccattcgtacagaatgagtattgagttatttctgaatctattccagcttcttttaatcccttatatgctgcttgaacaaattcatcttcttcgtcatataaccaacctgggaagaatctttcactttctatagtatttcctgtatagcaatcagctttttcaaccgcataagaaactttcgcatttaattctgggtcttctttcatcatttcatctaataaagcttgtattggagctaatacgccttctcttgtttctccaactaataatcttctatcaaaagtagctttgcaataatctggcactactgatgcccctggatatggagaagattttatatctgttaaaactaatattccatcacctaaaactggatgagttggaggtactaattgttgtatcttttggattacattagccattttataaactgcatttacacctttttctggattagcagagtgagctggtttaccaaaagtttctactactatttctcctctacctctctgaccaatctttaagtttaactctgaagactcacctattacaacatagtcaggttgaacagccttacttatctctctagccgaaacaccttcaaatatttcttcatgaacaacacctgctacatatagttctccagcaaaatctcgattagtgtctttagcaaaatacgctacagcagacatcattgcagtatattgacctttcatgtcagaagttcctctaccatatatctttccatcaactatttttccttcaaaaggaggaacactccatttacttgcatctggaactggaactgtatctatatgtccatcaaataatattttcttacctggcttgttaccttttatacatcctactatatttccatatctatctcttgaccaactatcaaaacctaatttttcaaaagactcttctattgcttttacaacaccttcttcatttccagaagaactaggattttgaattaatttttggcatatttcagttacttcttgttttctttgttcgtttaacatttcattatccccctagattttttataatgtatgtattttatatacttatatattttctaaattttagaacttatatatcttctaaatatgtaaaccaatatctaataattgcattttagtaattccttatatacttggatattctccatcccaaactatacttctatatttgtcagggtcagtatctccttctgtgcttattaaaagtattcttgaattttcatctaattttaaatcttttcttaaatctgctaaatcttctctttccatagctgctactaaaagaccagttgtaactgctccagattctccagaaattaccttttcatcaccatttaaaggattacctaatgttctcatacctttagcagaaacccagtctggtgctgaaacaaatgctgcagcatgattttttaatacttcaaatcctatagtatttggttctccacaagcaagaccagccattatagttggcatatctcctccaacaaatcttggttttccatctcctgcttctgctgatttatagtagcaatcagcttcatcagcttctactactactgttattgggcattcatcgtatattgaagcaacatatccttgaactgctccagcaagtgaaccaacccctgcttgcacaaatacatgtgttggtctatctactccatattcttttaattgctctatcgcttcttgagccatagttccatatccttgcattatccatgctggaatttcttcatatccatcccatgctgtatcttgaaccattactccatgatcatcagcttctgcataatcattagctaatcttactgcatcatcatagtttaagtctgttatactagcatctgctccttctcctttaattttatttaatctaaactcagaagaaccttttggcattaatacaacagatttttgacctaatttattagctgtccaagcaactcctctaccgtgatttccatctgtagctgtaaagaaagttatttctcctaatttttcttttatttctttcgaagttaatttgtcataccctaactcagatatatctgtatctaatctttgagctaagtatctacccatagaataagaaccacctaatactttaaatgcatttaatccaaatctataagattcatcttttacatatactcctgcaacacctaatttttttgctaaaccttctaggtttgctaatggagtttctttatattgaggaaagcttttgtgaaaatttctaaccttagttatttcttcttcatttaaaaatttgatacaattttccttatcaccctttggcaaattatttactttccatttaatttcttttaacatctaaaatacctccaaattattgttaaatttttatactttaatatataagcaattaacatgccaacactaaatatatactagatatttttctatgactctttagtatagaaattgcaatgcttttattattctttcttttctatctttagttcatacaatgtatgtagaatttaataactaaaaaaccttttctatcttctcactttttaattctcatttttaaaatttaaaaataaatctcaaaacactttgtttctatattttttaatataaaatttataaaatctaaattaaaacataaaatagtgatgcaataatctattacatcactatttgtatatatttaataatataataaatctttagtggtctctaagaggtgatttttcatcttttttaacatctaattcttcttttacgacattccatttttcaagaccaaacttagaaaccataactgcctctgcagcaccttttccaagtctttttactgtgtccatacctgtctcatcctcttgggcaccttttgcttttccatctttactccatattgtaccacctatatagcatccacctaaacctccagatactaacatttcatgcattaggaagaaatttattataggaagttttgtcaattcttggccaccatatctagttccaccagtagttatagctgcaccaaccttattttgaagttttcctggatgaactaaatacattggacgaagtctattaaatactgctgtaagttgagcagttatattcatatcataaactggagaacctactataattccatctgcctccaatattttttgctctaattcttggatatcatcttttataatacacatagtttcttttcttatacatgcatcacaatgtacacaaggacttatttttttccctctaactgaccaatactcagtttctataccaggtatagtttctgcttctttcaaagcttctaacactgcatattctgttgctcctttacgtggacttccacaaatacctaatatctttgccataataatatctcctcaccaaataaatctatttttattatctatttacaaatacaataaattgttgtttgtgctttaatttctactattttaattttattggcaatgaatgtatttctacatcagttgcattatatactgcatttgcaacagctggcgcaactggtacaacagcacattctccaatactcttaccaccaaaaggtccagctttttcataactatttacaaatgcaacttgacattttggcatatctacagttctaaataatttatatgttttaaaatcagtagctttaggtctaccttgttcatcaaatgccaattcttcactcaatgcgtatcctagacccatatgaatcccaccttctaattgaccttctaaatttaaaggatttataactctaccaacatcatgtacagctacaaaatcaactacttttatatccttagtttctttatctactaaaacttcagcaaaatgtacaccataagaagtaagtccagctggtgaagaataatcttcaacaacagttaactctcttaatgatttactttgactatatactgcgacatcagaaagtgatgcttttacattttcatcaagtttactaattacatatccattgtctagatataaatcttcttttgatgtttcaagtaatttttctgcttcttctactataaggtttttcaatttctctgctgtctttttagctcctccaccttctacaaatacccctctacttgcatagtcaccaaggttgaatgtacatgcatccgtatcagtttcaaatgtatcaactttatcaggtgttattcctaaaacttcagctaccatcattgtttgcatagttacgacaccattacccatatcatgtgctcctgttagtagtgtcaatgtaccatcttcatttaatttaagagtcaatgtaacaacatctctatgtgcaccaaaaactccattaccatgtgcacctattgccatacctatacctcttaaatattttccttcttcttttggaagttttttcttttcatcccacttaaacatcttcttaccttgctctatacaatccaatactctaggatttccaagagaaccgcggaagattatatcgacatcatctggctctactgcatttttattttgaaaatcgactaaatccatacctatttccttggctattttcgcaaattgagcctgttgagccataaatatttgaggtgacccatagcctctcatagctcctgctattggtgtatttgtatatacaggcatcccagtaaactttatatttggtattttataaactttaaatactttatgactaagtgctcctataacatttaaagcacttgatgcatatgctcctgtatttgtatatatttttatatcttgtgctattacttcaccatctttatttacaccagtttttaattttacaaaagacccatgacgagttcttgttgatatcatagattcctttcttgtaagaaccattttaactggtcttcttgtcatttttgataatgcggctgctactggttcaattgtaagttctaattttccaccaaatgagcctccaatagcaggtcttataactcttactttatttaatgacatcccaaaaatttgagatagtattattctaaatccaaatgtattttggcaaggtgtatgtacagttaatttatcattataatcatagtgtgcaattacactatgagtctctattgcactatgatgtattgctggagtagagtattcatcttcaaatatatagtcacattccttgaagcctttttctacatctcccccatttatgttgttttgagaaactatatttgaatctccatgtatgcagatagcatcttcttttattgcatcttgtatagtaaatacagctggcaattcttcatattcaacttttataagttttacagctttctctgctatttctggagtctctgcagctactgctgcaacacggtcaccaacaaatctaactgtatctgaaaatataacttcattttcaggtatattgtgctcataaaatcttaatgaaccattgtattttctttgtgatgtattgagataagtagctatagctctaacacctactactttctcagcttcacttgtatctatactttttatttttgcatgtgctacaggacttaaaagcatcttagcgtaaagtacattttgtggtttcatatcagccacgtatttcatttgaccagtaacttttaaagctgcatcttttagagggtatgattttcctattaccttttccataattatctaccccctaatctagctgcagataattttacagcttctataatctttacatatcctgtgcatctacagagattttctttaaaagcttctttaatttcatcttcattaggagatgcatttctatttaaaagagcttgtgttgttataatcataccaggagtacaatatccacattgtacagctccaacttctataaaagcttcttgtattggatgaagattttctccattagcaaaactttctatagtgtatataactttaccttcgcagttttttgcaagaagtttacaagatttcatgtcaactccatctatcaaaactttacatgctccacaactgccactattacaaccttgtttcgctccagttagatttaatttttcacgaagtacatgcaaaagagtttcattcttttcaacttctatttcatacatgtaatcattaatatttaattttattttttccattttctcctcctacagataaactaatgttgtaatagaatattattacaatcttattttaatattagtataagctattccacttatgtccttccattctattagttacattagctctcttacataattcttctgctgcaagttgtgcattaagcaacacttgttcttcactttcaattgtagttacttttccattttcaagtattacatttccatcaactaaaacactctctacattgtgcatactagctgagtataccaaagttgatacaggattgtgaagaggtattgattttggagaaagcattgagttaaatattactaggtcagcttttttcccaatctccaaagaacctatttcatcttccattctaagagttcttgctccctcaattgtagccatttcaagaactttctctgcagaaattgccagagggtcacaattatttactttgtgttgtaaagctgttaatttcataagctctaccatatcttgtgcgttattacttgctgcaccgtcaagacctaaactcacatttatacctttttttaacatttctggcacaggtgcaacaccagaagcaagatacatattacttgctacattatgagaaacttttatgtcatactttttaagcatttccatgtcttcatcagttatacatacacaatgtactgctacaacttctggacctactataccccatttttcaagtaattttatatctatttctccatgtatatcctttgttgctgttcttgcaaattctgtttcagatatatgaactgtaaaatatgaatcatattctttaactatattccaaagcatcttacccatttcttcagatatagcccacattgaagaaggagctacacagatttttattcttccattttctgaattatgatatttttcgaatacccttctcaaatctttttcaaccgtttccacatcttctataagctctttgtgaatacctaaatctatacaacctctacctacaacccctcttatacctaaatctttatatgcctttactattccatctgtaagtcctggtctattgtgagtatgcatataatcaaccattgtagttataccactttttaaaccttccatacatccaagcattgcagcatcataagtatcttgttctgttaagaattttgctgatggaaacatcattgtatttaaccactcatgaagtgccatatcatcacctaaaccttttaataacacttggaacaggtgattatgagtatttataaagccagggaatattacttttccattagcatctataacttttttagcatcaagatacttaggctcaatatcaactgtatttcctatatccaagattctgtcaccttgaatagctattgctccatcaaatataacatctctgtctttattaactgtaacaattattgcattttttattagtatatcaatcatcttaaatccccctttgaatactttcattacaacattttaccatatggttttctcatattatatctaatacatttatccaatattttcctcaagatttgaagtaacgttttcagcacttttacgtgactttaatttaaataatgtttgaagtaatatagctattattgctccagaaactatacttgaccctccaaggacagttccaattgtttctgggaattggtctaaaacttgtggagcagttgtaagacccatacttgttgctatagatacacctgctataagattgttttcttcagtgaatccatccatactcataatagagaaaccagacattgctattgatgagaaaactactaaagttgctccaccaacaacacaagatggtatagttgtcattattgcacccaatgctggagatatccctgctagtaataatacaagtgcccctagtgctattacaaatctacttgtaactttgttcatagatacaattactgtattttggctaaatactccagttggaagagctgcaaatagtgatgaaattatagaagttatagaatttcctaaaacaactgatgctaattcttcgtcagttacctctctatccattgctcctactgtagctattgtacaggcacccatcatatcagctatacctattatgtaaataatagtaaacattactattaactctggtctaaattctaatccaaaagctgctggtgttggtaaagatactatagctgctccttgaacggctgagaaatcaaccaatcctaaaactaaagatatagcataacctactaatattcctattaatattgaagaattttttactaaacctttaccgtatttatttatcattattattacaaaagcaactataactcctactgtgaagtttattgggcttccaaatgtttgtgtgccttctcctccagctaaattctttatagctgttgcgaatagtccaagtcccatacatgctattatagttccagaaactattggagtgaatatatgtctaattttcttaactccaaatcctacaaagaatacgattaccccagcagcaatctgtgctccaaatagagctgctaaaccatctttagctgctactgaaagacaagctcctaaaaatacataactcattcccatcattacaggtaatcttgaacctaacttaaatcctttaaataaaggtattggatataactgtaaaaacgttgctaaacctgctgctaacatagaaccctgaatcaacattgttgcttgcccctggttaagtcctaccacgtttgctattaatatcgcaggtaccatatttcctactatcattgctaacagatgttgtaaggccaaaggtattgattcctttagtggtggtatcccatcgacatcatattttgaagtattacgtgttttcataaaataaatcctcccatacataaatatcttgactaaatatttttataattattttctataaatatttttatgaccatgaatttattgctcaaccgataaacacagctaaactgagctatttttataaaaaattaacaaatttctaaatattccctccccgattttcaacttaaatgaaacattaattgcctggtatatatttatttgttaaattttttattaaaatgaatagctatcaaaaataatctaacaatctcatactaaataatttaaacaattcttttaaattattatatcttaattagtctcttccataacagctctttctttagcctcatcctctagacttttatttggtattattagatttaaaacgaatgcaaccaatgttgcaattactattggagattctccaaatactaactttacaaatgaaggaaatgcctcttgggctgctggtactgatgttattcccatgcctaaggcaattgccaaaccaacaatggtaatatttcttgatgacaactcttctgtaataattaactttatacctgtcattgttatcatactaaatatagatattgtagctcctcctaaaacagaatatggtatagtagtcattaatgcaccaaatttaggcacaaaccccgacaataacataaatataccagctattccaagcacaaatctacttattactttgttcatagctaccatccccacgttttggctatatgatgatggtggtaaacctccaaacaaagctcctatcatagtacaaattccacttcctattactccacttgataattccttatctgtgatattcctatccatgcctcccattgtagtagctgataaatctccaattgcttgaacagcattgattatacttacaattactactgagattattacaggcatatcaaattccatcccaaattcaagcggtttaggtatcgcaaaccaagttgcctctctaatagggtcaaaatttattatacccagaactaaagatacacaatatccaactataattcccaaaaatattgctgccaattttgcatatccttttgcaaattgactaagacctataactaccactaatgttatagccgctactgcccagttttgcatagaggcataagtaggactatttacaccacctgccatataatttattgctataggatacaaagataatccaattgtaaaaaccactgttcctgcaactatattcggaaaaaattttcttatcttttttatgaatatccctattaatactgtagccactccccctattaattgtgcacccaaaatgcttgctaatccataatttcctccgactgctacaagtgttggtacataagtaaaaccaactccaaaaattataggcaatcttgaaccaatatttcctattggatatagttgtataagtgttgatataccagctattattaatgcatattgcactaaaagtgttatttgtgtagggctaacacccacagctcctcctacgactataggtactgtaacagttccaactatcattgctagtatatgttgcattgatagtggcaaacactttaaaattggtggccttccatcaatatcaaacatagaaacattcttttgatatttactcaaggttatcactcccaactattttttaatgacagttattattatctcacacaacatcctttctttttttattttgtcatctcaatttaatatgaagcaattataatgccaattttttaacataattgttttacatatataatttttattatatttgttagtatttgataatttattaaagcatttatttttttaaattcttttaaattttttttatttttggataataaaatgctattacacaaaaaaacacttagaaaatagttttccaagtgttttttatcaattttataatttcaaattttagaattgagaataaaaaacctaattattatacatctatttttctgtacaatgtagctagtgatattccaagttttttggcagccagttttttagacttagtatcatttccgtaaaactttaacactttctttatataggctctttcaaactcttcaagtgtaagtatgtcttgttccatacttatctcatagtcactttcctcaagtaactttatatttatattatttaacttaaaatattcaagtatctttctatttattattcctttatgtattattccatcttcctcaagaaggtttaatgccagttctatagtattttccaactctctaatatttcctggccaaggatacttaagcaacatttgttccacatctggttctatatggtacacgtttttcttcatttttctcgaatatttgtctataaaattatttattaatatttgtatatcgtctcctctttctctaagtggaggcacttctaaaggtattacattcaatctatagtataagtcttctctaaatttattttccttaaccaactcaaataaatctctattagtagctgatatgattctaacatctatatcaattagttcatttgaacctattctcgtaaacttcttttcctgtaataccctcaataactttgattgtagttgaattggcatatctcctatctcatctaaaaatacaacccctccattggccaattcaaacttaccaattttaccttttgaatctgctccactaaaagctccttttgtatatccaaaaagttcactttctagtaaaggttctggtatagcagcacagtttatagcaacgaatgttttattccctctgtttcctgcgagatgaatggctcttgctattaattcttttccagtgccactttctccagttatagctacagtagaatcactatttccaattttgcaaattctattcttaagagcacgcattacatcagactctccaattatggagtctactgttgttgttccccaaatattatatacttccattccaccatacattactgaatcactgtgtttgtccataaaatatcaactccaaataagtattctatataataatcattcacattatctatttaattatatcataacagaaaagcttagttataatttaataatattattttaaaacaaaacttaataaaaagtatatctacttagttttaatttgatagatatactttcttcattttacaaaaatcctctattaaataagcaattacaatgccatattttatatgaaaataatttttaaaatttttaatttaagttcttattaaattttttatactactcgtaatttttatacctatataaaattacttttataaattttaaaattcttatttttaaaatttataattaaaaattatcttttttaaatcattttttgtgttttttatatcatctaacctcacagtttttgcttctataaacttacccttaaatgattctgataatttccaggaactataattcttatctttttgaatacaaggatataataatatacatctttttgcattttcatatgctgttatatatgcatacatctggtatatatcacttgacctataaaaaacatttgaatctacttcaatagctttccatttagtgtcaattataatttcatattcattttttaagtcatataaaactatatccggtcttaaattaaagtttttcttacctgtttgttcatttttcaaaagaaatttactcttatcttgtatatatgtttctctaaatgaattgtcccatatacttttgattaaaattcctatatattcttcatacaaagtatttatttcaaataatatagaaaatgcctcttgattattttgactattatccatagatagatttaaaagtagaagtctagctagtaaataacaatctttaaatctatcattgtttttataaaatttataacccaacagtttttttctatctatataaattaaatctacattttgaaaatagcttaaaatttttttaatcttgccttgaattgaattgtcatttattctacataaaatagatatacatgcttttttaagaacttgattcaagaaattattttcactacactcatcatattcacatcttattttcattggagaaatgcctttttcttttgcatatgtacttaataatattttacccctcataacatttaagttctctattttatttatatattcaaaataaataccttttttcatctgtgtttgcatactctcaatgaaatacataacaaaaaaatttaagagattataatttttcaaactcaatcttattttttcattcattgtaattggaattttattacatatagaaagcatctgtaatagtatctctctatcttttacaagattatcacttaatgacaatttaggaagtatttcaagtattacattttcaaaacatatgatgcctacatagtttataaatctaatttttttgtatttaatatctattatattactttttaatacatcattattgttctctagatatttaagcaatttttcatattcaatttctgtaagctcattttcaccattacctacccttatccattcataggtttccttaacatatatatttttactcatatatattttttagctcctcactagatatgttttgttttatacaatagttaactttactctccattattgaggcattattatttttaaataactcagaagctataagtttttctttataaacaatgtatttatctttttcatttcttccaattcctcctaaaatcaaacctactttttctgaatcataataaaaatactcttgaagaagtggtattattttacttctaaatactactactatatcattaatattttctacagcaagtagataagcttgtccaataacatggtctctatcatataaaaactctatccttttattgattgtatatagcatttttctaatatctataccatctacaatagacaataaatcataatctggcataatttcttcaaaattaaaccttcttcttaaagctatatctaaaagtgctattgatttatctgatgtgttcatagttccaactatatacaaatttggaggtagagaaaatttttcctttgaatatggtagtttgacaatagtttgatttgatttagtaagtcttttatcatcttccaataatgttattagctcaccaaatattttagatacattccctctattaatttcatctattattaaaacatagttttctgattcttcaaaattaaaactctcactatattctatattttctaatactaatttctttttcctgtcttttatagtttctaaagtcaagctatctttttccaactcaaagctcatctttttttcaaatttcaatgcattataacatgcttctatagatatatcctttaatatcccatcttctggcttaaaattgccttcaccatcagacttaagaccctctataaattcctcatatccatatgattgatgaaatgtacaaaattctacattgtttttataatctaagtaacctgtatagtatttgtttcttagactggtttcacttactagattgtaaaccatctgttttgtattgtatgttttaccagttcctggtggtccataaagtatagtatttaatggcattttattagtaaatctttttacatacttttcaactatactattattttcaaatataacccatgcatttccgtctatattctcctttccatactctatccatctaacaggaaaaaaatatccaccatccaaagcacttactttctctttatcgaacccttccataacttgacatacgccaaatagactcttcattgtatggtcattttcacaaattactttctcgctattatacaataaaatataatcatctgtctttatattttttaggctttctaattgttctagattaatgggctgaataaataattcttcatcatctacacacttatctacatttttataataatagttttttaaataccatttattattttcactttcttctattctttttctcaataatttcttatcttgtgacttaataatttctaaatatgaactaatatcattattatttaatttataaaattcacttgtatatactttacaatttgaaactgtatcaaaattatgcatccattttactggtagtgtatgccctaaaatatgacttaattcatatccattttcaaaatcttcttcaactatgccaatagacacattacatttaactttttcttctatattttgatatgctttatataaaaaataatctccttttttaatcgacataaacttttttataaaatctttatcattacaattctcattaatatacttttctgattttttccccatactgaatactttttttaaatttatttttatatcaaatccaagtgcaattatgctttcttctataaaaatctgtggtgtgtctgtttcctgataaaaaaattcttccattaaccaatactctgtacctcttatattttcagacatatacactctccttaatatctaaaatatactaattatacaataagcctactctaatatttccatttaaattttcctttatatataaagaaaatattacttcatagctttcttctaccttgctctgaatattacttattaaatcattcaattccattatagaaaattctggacttccttcaacaaatacaattcctttcttacttataaattcctcaccaatatattccatcctgtcaaataaaatgtcagctatctcgctatatgactttgtatcttcaaactcttcaaaagaatacttaattcctttatctcctacaatagcttcttttaaatcagtaatatctatatttatcatgcaagaatcagaaatagactctaccatgatattcattaaatcaacaaatttaaatatactatcattattgattttaaactctctcccaagctctaaatcttctttattttctttctctgaacaatccattcctatagatagaactcttctttcgtttgacatatatgaaacagcttttataatatctctaatatgtttatcttcagatgaatatatcaaaaataatatatctacaccatctaaaagacttctaacatattctttttcaatctcttgatttatgtttattttttctatatccatatttgcttttattttttcttctacttcatttattatattaataccttcaactccaataccaattattttagcattcttattaaaattttccattataacgtatatctccttaataattatttaatttcaacatttctaaatattataccatattttcttcataaaaatatcttaactcattggccttatcataaagtagcttattcaaaaattttggctctataaccttagcattatttccaataaaaaataaaatcgaagcataacaatctatatcttcaacctttatgaatgtactaattattccactaccatcttcatttagctccatatctaaattccaagaactgtcctttattttagaaacaccttctttagttaataatacatttagataaataatttcaccaaattttttagtagttgaactatttccatataaattgttatatacttcatgtaaccattcttccaagtttatatgtatttttttactttctcctgttctttttatatcaattatattatctatatgaactaatattattttatcacttttacaatcatatgctggtgaaaaccatgctcccttatttaaatatatacctatagggcatacgtttttttccaaaatctgattaccacacttatacttaatatttaaaattagagattctgaagaagctctaaaaaactcagttacattactactcttaaaatctccatcattagtatcattagctacaaagccaatgtatcttttaatattttctatacctacttttatactgcttttacgttcataacttacttttctcattatagaattaatttctatttccattaacttataattataaatctgaagtgacttaagtgcaaatagtataatcataacttctttttctgtaaatataacaggaggtatatagctattatttagcaccctataacctccatttctaccttgttctgcttgaattggaagtcccattttatttaattcttttaaatatcgttgtattgttttagctgaaagattaaattcctctgacaactcttttattgtaaacttttgcttatcattaatatatatccaaacatcagtcaatctttttaccttcgacaaataaacacctcttttcactaataatactctcaattaattaaattactatacactatttaaaatttaatattaatgacatttttatattttttcattaaaaagcagaaaaatggtactcctacaattgttactactacaaattctccaaaacctacctgtatcatagatagaattaatggaagcccaaagaatacatttaacattagaccaaccacaatcgaatttataacagttggccataaagaagctataactaaagtacttttattttgtttacctaactttctagtaatataaatcatacttgcacttataaatgtggctaatgttccagaaattatatcaggtacaccatatggtcctattacatttgctaaaaaacaacctaatgtaagacctactatatatcctttatctaaaaatgccaaaagcatcataatctctgctaccctaaattgtattggtccataacttataaatcccaatgataatgttaaaactgcatagattgctgtaattgctgcagttagtgctatattaatactattttttctcatatctgtctcctagtaaaagttttatttctaaaaaaattaataacataactttattttatacaaaatctataaacttaaacagtaattttataaaaacaaattattttagcgaactattttccaaattcattttatattatacaatataatacatacaaattcaattttatatatatagaatatatgatattaaaattatatacaaactaaagataaattttctattgttaattaaaaacagcaaaaaagagccttaaaattaggctctaataatttattttaaaatcagtgaactctactaccatcttttaatttagataatatcatccaagtacctatacaatcaatttccagttgtttctctatttcatcatataacatttcttgatatgatgtatttaaaacaacattttcaaccaatttagaaatttcctcttctgcaaaatcaatttctatttgattttgtttttctttaaaaaatacccttacttttctctgacttattgaacgaccctcaaagctgactaaacattctaaaatgttcttatctcctctaaaattatttactgctctcatattatttagattaccagccaaaacatcatccccttatttaattttgtattttataagtaaaattcataatattataataactacttattaaatatctttcaacaggtatgacataactggttgtttaacatgtaaaactagtctaaattttcataaataattatttattcatttccataaaaactttttcaggtgtaatagggagtgtatttattcttacaccaattccattaaacacagcttcttgtattgctggtaaaggtgtatttataacaacttctccaacagatttagcaccaaatggtccagttggttcataagtttcaacaaaatctactttaacatttccaatatcacatctagctggaatcttgtattgcataaatgtatttgtgtccatgcttcctttttctgtgtatctaacttcttcaaataatgccattccaatcccttgaacaattccaccttcaacttgtatcttagctagatttttatttataaccgttccacaatctactacagctacataatttactaaatcaacttttccagtttctgtgtcaatttcagtttctgcaaaacctgctataaaaggtggaggagatactgggctaccatgagaagcaagacctattaattgattagtatctggaccaattgtagaatcaactgctatatcgaataataaagtgctaccttttttactagttaattttataccatcaaattctacttcatccttctcaacacctagtttagttgctccagcagaaattattttttctcttaagtcttgagctgccttaactactgccatacctgttacataagtagtacttgaagcatatgaacctgggtcatatggaactaagtcagtatcagctgatataactgttatattttcaatgcttgtatcaagaacctcagcagccatttgagctaaaatcgtatcacttcctgtacccatatcagtagaacctatcataagagtataatctccacagtcattcaattttatttcagctgaagacttatcaagaccttgtataccagaaccttgcatagtaattgccatacccacacttctaatttttccattatcaagatgtttacaaggatatttttcattccatccaataagttctttgcctttatttatacattttattaaatcgacactatttaaagttttaccatatgcaaatgtagtttcaccttctgttaccacattttttaaccttaaatctgttgggtccatttttaatttattagcaagcatatttatagttgattcaacagcaaaacatccttgtgatgctccataccctctaagtgctcctgctggcatcttattagtatataccacatctgcaataaatcttgttgcttcaactttattatacattggtaaagttttttctccaaccaaaccaatagttgtagaagcatgctctccatatgctcctgtatcagaaagtgcttttatatctattgcctttattatgccatcatttgtagcacctagtctaacttttaatctcattgcatgtctacttgttgaacaattaaaagtttcttttctatcataaattattttagctggtttccctgtttttaaagtaacaattgcagaaaaaatctcaacacacgcagtttgtttaccaccaaatccgccaccaattctaggttttataaccctaattttgctagctggtatttctagtgcacgagataaatgtctttttacatgaaatggtatttgagttgaacttactacaaccaatcttcccatatggtctaaataattgtatgccctatacgtctccatcattgcatgtgcttgagcttgagtataataagtttcttcaatcactacatcacaattacttaatactttttctacatcaccttttgtataatcatgatgggatactatatttttttctctttgcatacctatatcaaagttacaatgtctatcttcatcatgtaccatagttttatttcctattgcctcttcaaaatccaaaacaggtgtaagtacttcatactttactttgataagattcattgctttaattgcagttttttcatctatagctgccactatagctacttcgtcacctacatatcttacaacatcttcaagaattaatctatcatatggagatggctctggatatgtttgaccagcaagtgtaaatcgagattttggtacatctttatatgttaaaacacattcaacaccatcaaccatttctgcctttgatgtatctatatcttttatttttgcataagcgtgaggacttctaagtatctttaccaccaaagcattttttgctgataaatcatctgtatatacaggctttcctgttgtgatactcattccatctattttcttgattccttttccaactatattcatgttctattttacctccagataagttttgatagctcttaactgtcccatataccctgtacatctacatagatttcctgtaagataatgctttatttcatcatctgtaggattttcaagctcatccttcattgcaagtacagtaagtataaagccaggagaacagaaaccacattgctcagctccttcttttaccaaaacttcactaaattctttaacttcattttctaaaccttcaattgtagttatttctttatctaaagctctcaatgtcagtgttgcacaggataatgtaggtttcttgtcaattaaaactgtacataaaccacaacagcctgtgtcacaacctcttttcacacttaaattaccaacttttcttaaagtatcaaccagatattcttctggttctatatcaacactttttttcttcccatttatattaatctttactaacattaaataacctccattatagctctttttaaaagtactttactcatagcttttctatactccctagatgctctcatgttagaaccaaaagttagttcttctgatgctatttctactgctttatctatattaatttcattgatttcattgttagatagaaattcactagcttgttttgcaatcgtagctttctgcggtcttgctcctacacataacttaaattgttccatatgttttgatacagatacatttagaattggataatcactctttgcatttctaagtgatttataagaagcattcttatttgtcttctttatgtatatcttaataagtaaatctttctcataatctctatttagaaactcttcaagactaattctcccaatattatataattctacttccgtatctaatgaaagtaatgctactatcaagtcagaaaaaccatatttagaaaatactgttgcaccaactgttactacatttctaaactgaactcctattatatttttaactgaatcttctattattcttccaaaattattttttattatggaacttgtttctaatgttctaaaagtagtcatagaaccaatctcaacgtaatcttcatactcttttatataatctaaatttaatttagataattctattcctgttcctattctttttttccccattcttaaaaaagcacttccaccaattacttggttagtttttcttttatttaaaattgagtacgcttcttctactgtatctggctgtacaatatccataaccgtaaacataaatttcctcccttatttgctattcttattttaaatacaactaattatatcatagcttcaacaaattttgataataaatatgtctaatatgtaaattctgtaaattacttatacataaaaaaatgactatttcaataatcatcattagacaatattaaaatagccattaacaggtactattttaaagcaaaactttaaaaagttgatactttttcacttatatttatcacttcttcttctaataatccaagttttttagctactaattttgtagtacttccttgtattactaatgtaattaatatagtcataaatactacagatgaaatcacttcgtatccaggaactttcattgctgaaataataccacaaagtgctgctggtattacgcctgtttcccttacccacatcataaataatatttcacttttactccattttgcttccctgtctacaagtgtacaaactaaaacgcaaagtggtcttgctataaacattaatactaatactgtaattacagatggcataaaatatttacttaactgagccaaattaacttggctacccaatattataaatattgccatacgacaaatagtacctaaagtttcagcaacataaaaatctgcatcataagatttttgacttaaccaaattttaaagtttttcttgttaccagttattatacctacaataaagcaagacatatatccacttccacctaattttgtagataattcatatgcaactacaactgaaataacagatattattggtgcaaaatctttaaatattccataaggtttatcattaactaatttcaaaagcagtattcctgtaattaaaccaactaaaactccgacaataaccattgtccccagttcataaatattttcacctaatgaaaatttatttgacaaaattacagccaacactgctgatgttagtatagctcctgttgcatcattaaaagctgattcacttattacagtttgttttaccctatcctttatctttacctgattaaatataggtacaagagtggctgggtctgttgatgctattatagttcctgctagtaaagcagtcattgcacttatcccaaaagtaaatcctattacttgttgcattataaaagcagatatcacaactcctaaagtagctaataagaatacagatatcttcacatttctcaatacttttaaacttatttcttttccacctaaatataaaataaatgcagaaccaaatgtaagtattagttgattttctatttgaaatccacgaatatctataaattttaaaaatgatggtcctattaaaatacctacaagtaaatataacactacatctggaacctttattatttcactaagcttactacaaattattccagttatacttacaatagcaaaaattatcaataaattattgctggcaattgtgtgtatagatgcttccatgtccgtctctcctcccgatttgcatacattatgcaatatacttattgttttactatataattatagcacacaaataaatgttatcaatcattttttttaggacatgcaatttagctttcatttttgataattaaataacgcttatataattttgctattttttgctagttattaaaaggttgattttgtcaagtttatagtatatatatattaatattttttatatccatatctttttagatatttttcgactttttcctccattaaaataagtttaaatttaacaataaaacatttcattatatatattttttaaaatgtaccattttcaacattttcattaacttggtctattcatttttttcttatctattctatatccaagcatattccctatatttttacttacatgtaattcttgagctatttcaagtttattatcattgctttgttttatcttagaaatctcactttgtttttcattttgtttatcttgtttcatagtttctcctttcaaaacaatatcactttttctgtttattacttattatttcaaatttctataattttaatcaaaaaagggaaatatctcaatataatatagcttactcaacaccatatttatatatagaatttccctaattattttattaatttaatttttcaataaccttatctaaattagaatttactttatcttcctttttccaagaatttaatgtataatgcgttccaaatgtaaataaacctgaaactattaatataaaatagtatacaaacccactatataagagtacagagtaccccaataattcttttggaattatattggagaacatagtaaaaaatgtaacctcattagctccaacatttcctggtgttggaattggtgatatagccatatataaaaagacctgtaatgtcattatatgtacatatgaaactcctcttaaatttgaggctttatacacacaataaactatactgaaatatgcgattaattgtaacacagtaagtaatatacttaaaactaagattcttacatttttaataaatatttttatagaataattataatcatcaatataatgatttattctatcacgttttgaatctaaaaatttaaatgttttaaatttagataaaaaattaatcaaaacttctgctatcatttttacttgttttggactaaatactattaatagtccacctaacaacatacttacattcataatcattccaaaagttatcaagactttcacagaatgtacttgctccatcagtaatgacttatttagcaaaattaaaattccacaaaatacagtaactgtactttgaaatactacagttttattagtaactatagccactgatttactaaggcttacatcatattttgtaagtgcatatatttgcattggttgactcccagatgcaaatggagtaactaagttatagtaaaatcccattgtagccattttaataccaataaattttacttttgttttttgaactgcatttattatcaaatgagttacaatagattcaattatcatatatactataattgtcaatatgccaagaaatatataagtcttatttactagccttataattttaggtattagttttatatctaaagtagttaatactaaataagtagtaatacatatcaaaaataataaaaatccatattgaataaaatctttttctcttttggataattttctcatttattttctcctaaattttttcatatcactatacatagtatactacttaacctattatttgcaagactaaaaaagataagtctttatttgacataaatacacctataaatttttaaatattcttactcctttagtagaaataattctccatatcataaaatctaatataaaagtaagtatacttgccaaaataatatatatatttaaaaacgaaattccaagtaatacatatatacctccaagtataattacgtaagctaatgatactaacattgtaattatcatacttgcacttctttttactacagccatctcatttttccaatcaaggtttggatataataaatttgataataatcccatcaatgccacaaacattgaaaaacttgcaatcaaacagattgatacaataataaactgaatttcaaaacctaatcttatagatactaatattaaacataaaatagataatggtgcattcaataaaaaattcatcaatatttttgaccagaatatttctctttcatctattggagaagatttcagtatccataaattttttccttcaagagaaattgaacagtatgttgtacaattcattactattataaagaagaatactcccaataattgtatttttataaaattaaaatctatattcaatttcagtaactcacccactttatctgctccaaataataatattaaaattgtacctattattaggaataacaaacctgcagatgaatttaaaaagtatataaatgaagaagtatatctcttaaattctttttttaatagagcttttgaaggtcttgaagttttttggctcttaaatttataagtttttgacttatatccttcactcatcttagcatttatatctttaaatttttttgcaaataatgttacaaacataaaaaatggtattattgaaattgctataaatgctaaaaaggaaactacacttcctgttttaagagcgtcaacaaaataatatataggtggatatatttttctaatcgtctctgaaatagatacactattctttaacatctcaaccgacatagagttaagtcttgtcataagtagagtataaagcaacatcaatataatactacctataattaatattaaatttttgtattttattcttgatgatatctgtcctataaacataaaaattattgatgaagcaactattggtaataatggtaaagctaaaaatagcagtatcaaataagggaaatacgttatacttacatcagaattaaaaaaataaaccactgctggtataatcatacatattgaagaaaataaatagtttgctccaaccaacattaatatcttacttgctagtacagtagattcttttataggtaaactagtcaaaaggtctaaatcttttgcttgaaacagatatgatgacgttttatataatgatgtaacaatagttgttaatgttgataatccaaatccaaatataagtagcatttccatctgatttatttgctttaaaatatcaactaaagaaagacttatactagttacataaaaaatcaataaccctgttataataacaactgaaagtatcatccccattattttttgtttttctctactatcagctttttttaacgcatttaatttaaattcatttattatattagtttttattaatatacttagattgctcatattttatcattcctcactttagacactatattgtataaaaaacattttatttctctattaattccataaagatactttcaagtgaattacttcccttaacttcttctgtagttccataagcaattatatttccatcttttattatggcaatcttatcacaaattttttcagcaacttctaaaacgtgtgttgagaaaaatatacaaccacctttgtcacaaaactccctcataatttccttcaatataaaggaagcttttgggtcaagacctacaaaaggttcatcaagaattaagatttttgggctgtgtatcaaagccgaaattatagctaatttttgtttcataccatgcgaatatgaagatattaaatctcctaatgctttattgagttcaaacttatttgaataatattttattaactcttctcttttgtctttggcaacttcaaatatgtcagctataaaattaaggtattgtatacccgttaatgactcgtataaatctggattatcaggtatatatgccatttcctttttacattcaacaggctgtttttttatagatttagaatttattagtacttctccctcttcaaaatcgtgtattccaacaattgctttaatagtagtagttttacctgctccattatgtcctataaacccaaaaagctctccatcatttacatcaaatgagacactacttactacttttttatttttatatgatttagatacattgattacttttaacataatttccctccatattatagttttgatatttgttatatataatatataacaaatatcaaacaattacaacttttatttgtttattttagaaatctataaaatgcaaaggtatcagaaatataaaggtataaatataattgatatttactttcaaattacacataattataaaagaatatatagttcgatttgaataaacaatgtataataaaaaatagttgactataattattaaatataaggagcaaaatatgaatacatttgaacaattaaaaataagttccactctaatagatggacttaaaaaacaagacataacttctccaacagaagttcagtcacttgttatagggaatataattcaaaataaggatttattgattaattcacagactggaacaggaaaaacactagcgtaccttttacctatatttgaaaaaattgatacatcaaaaagagaaacacaagctcttatacttgcacctacgcatgaattagtaatgcagattacaaaccaggttgaattattggctaaaaatgcagaactctccgttacttctttagctttaattggggaggtcaatatacaaaaacaaataaaaaatataaaagcagtaaaaccacacatagtaattggctcttgtggaagagttttagacttgataaaacaaaagaagctaaaatcacataatataaaaactatagtcttagatgaagtggacaatctattgaatggaaaaaatataacttgtatagaagacataataagaacaacgttaagagatagacaaattataggatgctctgcaagtcttactgatagcactataaaaatttgtgataaacttatgaaggagtttgaaataataaaaacaaaggaaaaatcacaaataaatcctaacatcaatcactcatatttattaggtgagataagggataaatttacttttcttagaaaggcattagcagctacaaatccaaaaaaagctattgtatttgtaaataatgaaaaaaatatagaagtcctagtatcaaaactaaattatcataattacaaagcaataggaatttttggaaatatggaaaaagaagatagaaagaatgcaataaataaatttaaacttggtaaagcaaagattttaattacaactgatttatctgctcgtggactagatattgtggatgtaagtcatgtttttaacttggattttccaaaaagtaaaaatgaatacctgcatagatgtggtcgaacttctagaggaaatcgaagtggtaacacaatctcaataataacaaaaaaagaattagatattataaaagatttgcaaaaagagttcagtatagtaattacacctaaaactttacaaaatggagaactaatagacattattaaataatacaataaatacgaaaatacaacaaatacaaaagagctgtagtttatcatcacaattgataataaattatagccctttattttatattaaattaaaattttaaataatacctattataatagccaaagttttattataaataatattgccagaacaatcattactacagaaacatgttttttgtcttctgcctttttagctccaaatatattataaaatatatttacgaaaacataagttaatatacctaaagttaaaccatcacctatactatatgttaatgccatacaagcaatagtaacaaaagctggaacaccttcagttatattatcaaactctatatccttaactgtaccaagcattaaatatccaacatatattaaagctggtgctgtagcacatgatggaattgctataaatacaggagagaaaaacattgcagctaagaataaaattccaactgttattgctgtccatccagttcttccacctgcgataactcctgttgaactctcaacataagttgtaactgtagatactccaagtcctgcaccaactgtagttgcaaccgcatctgtaagtaaggctctacctacattaggaacattccctttttcatctaacatgtttgctttagaacaaacaccaactaatgtacctactgtatcaaaaaaatcaacaaataaaaatgtacaaactactactaaaaaaccacctatatttgttggatgtagtacatatcctaaatctattttacctgctattggtgctaaactttcgaatttaaataatccaccaggtaaatatatacctaatttttgtgcatactctggattcataaaagcaaatgcccaagcaagtaatgaactcactactattccaaaaagtatagaacctttaactctttttttatctaatacagcaataattattaatcctaaacaagttattattactgctggtgtaaatctacccattttgataagagtggcttggtctccaataacaattccactgttaactagacctataagtgcaataaatattcctataccacctgtaacagctaatttcatattttttggtatcgcatttacaacagcctcacgaactccacttactgataatactataaaaataataccttctacaaatactgctgtaagagctacttcccaaggaacacccatttgtaaaactactgtatatgcaaaaaatgcattaagacccatacctgatgctaaagcaaaaggaaggttagcaactacacccattaaaatacatccaaatgctgctgctaaacaagtacctgtaacaagtgcacctgcaggcatgcctgtctcagataaaatatttggatttacagctattatataagccatagttaaaaaagtagttactcctgcaattatttccttcttcatgtcgacatttttattagtcaaaattggaaaaagtttctgcatagtactactgtttgttgtttgcataacaacacctcctattaaattttacaaaaaaacgacacagtagttgataagctgagccgtatccttcataattcagttaattaaatatttaattaactaaataatagtatacatagtcagaatatttacggtattccggtagaaacttatgacccatattgtcaaaattatatgttatacagtacaaaacatgaatttttctttacgaatattattttaatttatataattaattttgtcaatatatacgtatatattgtattgattttgtattaatattcgattatattaaatattgatttattaaattcaaattataattatattctttacattttaaaaaaatatatgatattttgatacaatttatttatagtttggatataaagtttatgttaagattatactataataaattaataatttttttatttggaggaataaggtgaaagatttaactacaggtcatgagggaaaatccatattcttttttgccatgcctatgcttattggtagtttatttcaacaactatacaatacagctgacagtataatagttggtagatttatcggaaaagaagcaatggcggcagtctctggagctaaccctataatgtttttattggtggcagcgcttatgggtgttagccttggattttctattttagtgtcacaattttatggctcaggagatttaaaaaaggtaaaagctactattgatactacatatatacttttatttattggttctatattaataagtattcttggaatagtatttggtggcccaatgcttaagcttatgaatacaccagaatccgtttttgctcaatcaaaattgtatcttactataatatttagtggaatattattttctgctggatataattcagtaagtgcaatacttagaggacttggagattcagtaactccactttattttctgataatagccacaattctaaatatagttttagacttaacttttattgtagtgctaagaatgggtgttgagggcgttgcacttgccactataatggctcaggcagtatcatttataataagtataatttatttaaataaaaaacatgaagtgcttaaatttaaaatcaaaggaattgtatacgataacaaaatatttaaagatggacttagattaggacttccaagtggaattcaacaaatgttgttttcaattggaaatatgactcttcaatttttagttaatagttatggtacatctgctatggcagcttttggtgctggtcttaggatagaaaattttataagcttacctattatgaatcttggttctgctgtttctacttttgttgctcaaaacataggtgctggagaaaatgaaagggttaaaaaaggcattcgagaatctataaaaatgaccttagttttagcagttacagttattgctttaattttgctatttagggaaaatctaattgctctattcaatactgataaagatgtcattaaaattggctcttcttacttatttataataggaccattctttttatttattggaacttcttttgtactttcaagtgcaatgaaaggtgctggtgattccatgtttgcacttataagctcaatagtatctttatggcttggaagacttccagcttcttatatgctttctaaattttttggaacagacggaatttggatgggtattccttttggttggactttaggtcttattgttacagttatctactataagaaagggtattggaaaactaaagctattgtaaatcatagaatcaatgaataatctttttataaaatgtattcacattcattgtattcacctccattatgatataataaattatggaggtgaatataaaaatgggtattattcttaagccaaaacaattttatatgactgttatagttaccataattctctacttctctcttaattacagtttcaacataaaattttctatatgcttatcttttttaactatcttgatatgggctgtagactcagttgaaaaaacttttgttgcattgttttttgtaattctagcgtttatatttaacattgcaccaataaaggttattttacagtttttatttacagaaaatttttacataataattcttgcatacataattactaatgcagttacaaaaacaggtgtcgcaaaaattatttctgagaagttaattttaaatactgtaaatacccctaaaaagatgattcttttatcgtatattttaggtattcttttaatattttttatcccacaaccatttccaagggttattcttgtatctgctttttacaaggagtttttaaaagaacaacagataactgaagattcaaaatctatacttttatttagtatatttacagcatctacctttacatcaatgttttttgtaaatggagacacccttctaaattatgttgtactagaacttggaaattgtaatataaattggggtcaatgggctttttatatgtctgttccaactataattacttgttttataacttattttttatttatctttgtctttaaaaaagaattgcattcaataaaatttatttctaatgaaaatcttgagggtaataaacttcatttttcatattctaatttaaaaaaagaatttaatttgctaaacaaagagcaaaaacacgtatttttatgcctaggaataatgttttttatgtttttaactcagttcatacataacataaacacattaattataatgtcaatttgtgtacttcttttattactaagaaaaatagttggatttagtactttaaaagaaataaattggaaggtccttattttttttatagcagcattttcaattggaggagtgttaaagtactctggagttgtagatataatgggaaattatttgataaagtttataccaaactcttcagaaattatttcaatattgtttttgataactctcacaataatcttgaatatatgtcttggaagtgctgtcactacatcatctgtagtaataccattacttggaagtttacatatactaaaggaaaatagtgttactttatgtctatttgtctacattatagtaagcatacagtacatattaccatttcatcatgctacaataatggttggtcatggtgaaaatctgtataatagcaaggttattttcaaatacggtttaactttgattcctttaacctactttataataatatgtataacattcccttggtggaaatttataggactagaaatctaaaaaagatgaaaatatgaattaacttaagataataacgaaattattaaaaagaaaattcatattttcatctttttatataagttcttgtgaaattggacaaaactactcttttaccataatactaaatattatttgttttacttccttttccaaaagtattctcccaatcctctataaacttatctacactccaatcagttaatggatgattcatcatagatttacaaatatcatatggtactgtaacactatgcaccccatgttgcattaattctataacttgttgtgcatttttaaaactggctgcaagtacttttgtatccattttataagtatctattatttttataagttctgaaaccatagctactccatcaccagatatattatcaagcctatttacataaggtgcaatataatttgctccagcctttgcagctaaaaaaccttgatgagcagtgaatattgcagtagcagttatttttacaccttttctgtgaaggtcttttatagctcttaaaccatcttgtgttacaggtatttttacatatatattttttctcaaactacttatatataatgcttcgtctaatatttcttcatactttgtacttaacacttgagcatgtataggcatatcctcacctataatctcaccaatttcatttataagttgcttaaaattctttttttcttttgaaacaatacttggatttgtagttacaccatctattggtaaacaagtacataactccttaatctcctccacattacctgtatctaagattagttgcattaaaatatccccctttaatctttctttattcttattatatattgatttggtattattttcaacattttgcttattgttttttattttttattattgttttgcttttccttcttagttttataatttttttatttactaaattctaaatatatagttagaaaaaacatactttttatattaaattaattttgtatttcatgttaaaatagttgatatattgtattttatcttataatatttactataatactatattgcgaaaagaggtagaaaatgtttgcagaagaaagaatccaagctatattaaatatcctaaaaaaagaaggtagagttactgtcaaagagctcagttctaaatttaatgttacagaagattgtataagaaaagatttaaaaaatatagaaaagatttcttcaataagaagaatttatgggggagctgtactagctagagaaacactagagaatcaggatacaaaagacagaaaagaaattaatattccaacaaagaaaataatagcagaaaaagcatttaatttaattgaagatagagaaactatatttttagatatctctacaattaacatcttgcttgcaaagttgttagctgaaagtaataaaaaagtaacacttgttacaaatatgttggatatactaaatgtagttacttcaaaaccaaataatttaaatataatttccactggaggtttattaaatctcagtttagacggttttgtcggtactccaactatagagtttatatcgaaatataagtttgataagacttttatgggaagttgtggagtagatgtattcaactcttcacttacaacttttgaaattgaagatggtctcacgaagaaggctataataaattcaagtaaaaaagtatttatagttatggaagataaaaagtttaaatttgatggaaatttcaagtttgctcatttagaagatattagttctataattacagaaaaagcgcctactcctgatatagtagatattttatcagaatttaatgtaaatgttttataagtttaattatatattttataggatttcttataaatataaatttttatttgataactattcttaaaaacatatttctataatatttattttatccttagtatctattttttaaaatctagttctataacatctactttatccttatgtctatttataaaactaatttgaaatagactttctaaatctaatacagttatttttagaaagtctatttccttaaataaactatttaatattactggctactttttatatgaatacaataatttgttattcataaataaaagcttatttcatttcattcttcatttgcttctctaattctttagaaaatttcttttgttcatatctttccatcatctcatcttttttcatttctaagtttaccatagcaccttgtgcatcatctttcaaatcttcagctgtatttttcataacataagctgtctttttaacaccttcttttaaatcttctttcatatttttcatatctctttttaatctatccatcaaaactacctcctctgtaaatataatacttcctatatttatttttcccaaagtacatatatttatttgtaatatcaattataatttttaagtcttaaatatagtttaaactgtctaaatctatacatttcaataaattaaatattttttatttcaaaataaaaataacactaagcatagattatatgctcggtgttattttttaaattcatagtaacttaattgttgggttactataatgatgacttatatggaggatgtaaggaaatctcatcattatagttggtgtattttatggttttaagcttctttatatttatataatacagtttcattatgaattttttgtgattttaaaatgaactattattgaaagttatatattctttataataagtaattaatttttaaattctactgtgaatactacagagttttctttgttttttatgctataatcaaacccatgacttttaaaaatttgactgactatataaagtccaagtccacttcctccagtttttcttgaacgggatttttctattctataaaatggattaaatatctcttctaaataacgtttctcgatagttacaccagtattttcaatttctaaaaccactctttgattagaagtctttttacttattcgtttatttttatcatagagtctaattataagctctgatttttcaggagaatattttatggcattatttattatattattgattgccttagttattctctcttggtctgctttaatttccaaattttcttctatttttaaaatagttttcatatgtttttcttctattaaaaatacttgtctctttacaagtctatttaataattcacttatatttattgataccaatttcaaatctttttcaagtatttctgattttgaaacctctatcatttcatttactaaatcttttaattcttgtgtacattcatatgattttttcagataagtatccctatccttatacttacctacactataaatcataccttcaatttgaccacttattatggttattggagtttttagttcatgtgatattgtagcaacaaaatccttccttctatattcctgttctctctcactctctattatatttataagaggctttgttattacaattgaatatatatatgctccaataatcgctatcaatattgctattgatatgatgtatggcattagttttcttataacttcgtttgcttcgtcaattggttgtaatggcataacgagttctaaagtatatggaccatcttttgcatctttagtatatataggtatagaagttctatactcatcctcaagactattaatcatgtacttactatatcttaaaataactacttcattcttaccatatacaattttcccttggttatcttttaataaaatagccaaattttggtctttagccatataataaagtctttcttctaaagtatatgtatcgaaatgaattgaactatctactaaagattttaaactttcttgaagagactcaattttatactcatgataatatgatggcaataaaaaatataaaattagatatattattaaagctaacgctattaataatgatgtcgttattgaaaataacttatactttatacttaacttttcccacttatcaaatatccttctcaagtgtatatcctattccttttacagttttaatatatggtaacgatattttttttcttatattttttatatgtgcatcaacaatcctagtatctccataatagtcataaccccatatactatccaaaagaccttccctagttataacttgtggatacttttctatcaaagcttttaatatattaaactcttttagtgtaagttctataggttctccatctatctctgcaatatatgtgtttaaatctaattttaatttttcaaaaactataaatttgtcatttatagtcttgttacttcgccttaaaattgcttctactctttttataagaagattaaatgaaaatggttttgttatataatcatcacattctaagtcaaaccctttaagttggtctccttcatcatttaaagcagttaaaaatataattggaacgcttgatgactttcttatcattttacaaactccataaccatctaagtttggcatcattatatctaatattactaaatcataacttccttgcttaaacttttgtataccttccaacccatcatttgctgtatcaacttgataaccttctgcacttaaaaattctgatattaactcttgtatatttgaatcatcttcaattacaagtattgacgaattcattctatcaatcctttctattttatttaaaatttcgtatattacttatattttatcttattgttgtgaattttacatgaaaaaagagctatcttaatttgtaaattaatccttttaatttaaagatagctcttttggatacattttatttaatttattaatctaatctctcttatatgccttgaagtttttaagtctaagtgcatttgatacgactgaaactgaacttaagctcattgctgctgctgcaatcattgggtttaataaaggtcctccaaatacatataatattcctgctgctacaggtataccaatcgtattatatccaaatgcccaaaataggttttgttttatattttttatagtttcatgactaagtttaattgctgttggaacatcaattaaatcactcttcataagtactatatccgcagattcaatggctacatccgttccacttcctattgctatccctatatctgcttttgcaagagctggggcatcatttattccatcccctaccattgcaacaaactttccttgattttgtagtttttcaacttcttttgacttatcttctggtaaaacctctgccaaaaccatatctatacctacttgatttgctatagcatttgcagttttcgcattatctccagttaccattgcaacttttattcccatatcatgaagtatttctattgcttttttactactttctttgactacatctgcaactgctattatacctgataaatttccatctacagctatatacataggtgttttaccttggcttgccaatacatttgatttttcttctaaatccccaagctttatattattgtcattcataagctttctatttccaagtaatatactttcatcattaatagtaacttgtataccagcacctggtatggctttaaaattatcaactttttcaaattttatattcttctcttctccatacttaactattgcttctccaagaggatgctctgaacctttttctgcacttgaagcaatcttgataagatattcttcttttacattattatttaatactatatctgttacttttggctttccttctgttatagtacctgtcttatcaaatatcactgtatttactttatgtgcagattctagtgcctctccaccttttatcaagattccattttctgcgccctttccagtcccaaccattatagcagttggtgttgctaatcctaatgcacaaggacaagcaattacaagtactgatataaatatagtaagtacaaatactatatcttttcctcctattaaaaaccacaataatgatgcaactacagctattgcaattactattggtacaaaatatccagatacagtatcggcaagtttagcaataggtgcttttgtaccttgtgcatcttcaactaactttattatttgggcaagagcagtatctccaccaattttttcagccttaaacttaataacaccatttttattaatactagctcctgtcaccttacttccaacatttttttctactggtatactttcacctgtaagcattgattcatcaactgatgtatatccttctattacaactccatccacgggtattttagttcctggttttactaatagtatatctcctatctctacttcttctataggagtttcaacttctttaccatcaactaacactattgcagttttaggttgtagccccataagctttttaattgcttctgatgtttttccttttgattttgattctaaatatttaccaagtaagataagtgctattattattcctgcactttcataatacaactgatgatggtgcataccttgaatttgtccattggctatttgtagtgtcgtatatagactatataaaaatgcggctaatgttcctattgcaactaaagaatccatattagggcttaaagaaaaaagtgatttaaacccatttatataaaatttataaccagctatcattactggtattactaaaattaactgaattaatgcataattaaaagtatttgtcataggatttataatttctggcaaaggccatggccctataggctttattatcataggtcccattgctatataaaacagaggtactgcaaatactattgcaactataaatttaacaaataaagacttcatttctctttcttttctcaatttatcttcatccacatcaaccttatttcttacctcttctattggtttatatccagctttttcaatagctgcttttatttgagataattttacttttgatgggtcatagtctatattagctttatctgttgcaatattcacactaatactttctactccatccaatttttttaccactctctctacagcttttgcacaagctgcacatgtcattccatcaattttcatatcaatttttttattactttcttcctttataattccatatcctgctttttctacaacctgctttatatcatcaaaattaaccttagaattatcatattctattttaagtttttcagtagctatatttacactttggtcatatactccatccatcttcttagttactctttctactgcctttgcacaagctgcacatgtcatacctgtaattttataactttctaccactttatttgaactcataataaaatcttcctttctttcaatatattttcagctaatttgtaacgttttattttgatatgtaatattgataaattacttatttagaaatctatatttttattataccccctataggtatattaaatcaatatttttttaataaataaatgtattagttatatttatttgtatttaatagaaaagtatactcataattaaatgtatatataaaaatagagcatctaaattgtttaatgcttatacaatttagatgctctatttattataatttatattttatttaaaatttattctttacatgcttcaaaaaactctgcttctgtttcctttatttcaagctcattgtctattattccaacagcttcttttttaaatgctctacactgacctatacaaccagtctttacattttcttctccaaccaaagtttttagcttatttacatccacatttgaacagtttggacatactcttatcatatttaagttcctcctaattaatgtctaattaatacttttatacccaaatataaactttataaaagtttttttaatataaattattaccatatataccatttatatcctattgtgagtattacatattaattttatatattattaatactacatgtacggtggtatctgttgttttctcactatttccaattccttaatttctaaagacttaatcacatttactttatagttttctttagactttatatacaaaacatcttctatctttttaccttcaataaatttatgagaccacttaagaagttcttcaaaattacaaacttcttcttttataaaagtatcactttcacttgcaaaatatttaattattattttggttacttccaacatatatcatcctttactcttttattaatctttttatctattaagattattatttgtctaaaaaatttttttaaacagaataattttcagatgcaaaactaacagttttatccaatttaaactatattaatacaatttaatatattcctccttgtacctaataatatattgtgctataattaataagttattttaatcgaagggagcaacaaaaatgtcacaaaaacataaaattataaatatcgcagttatagcccacgttgacgctggaaaatcaacattggttgatgctttcctttctcaaagcggtgtttttagaaagaacgaagtagttaaagactgcgttatggacagtaacgaccttgaaaaagaaagaggcataactatatattcaaaaaactgtgcaataaactatgaagattacaaaataaacatagttgatactccaggacacagtgacttttcttctgaagttgaacgtgttatgaaaactgttgacacagttattctattagttgatgctagtgaaggcccaatgcctcaaactagattcgttttacaaaaatctttagagttcggtttaaaaccaatattatttataaacaagattgataaaaaagaccagagagcggaagaagtagttaatgaagttttcgatttatttgtagacttaaatgcaacagatgagcaatgcgaatttcctataatatatggtattgctaaacaaggtattgctaaacttgaaatggatgatgatagtgaagacctttctcctctatttaaaactattgtaaatcacgttgaagcttatcctaattacgataatgaacctctacaattccaaatatcagctcttgcatatgatgattatgtaggtagacttggtataggtagaatttacaaaggtactcttaaaaacaatacacaagttgctatatgtagagaagattctgttgtatctaaaggaaaagtatcaaaactttctgtgtatgaaggtttaaaacaagttgaagttgatgaagctactagtggagaaatagttgttatagctggtattcctgatatatctataggtgaaactatatgcgatttagatagtccactacctatggaaatgataaaaatagaagagcctactctttctatgaacttcttagtaaacgactctccattcgttggaaaaagtggaaaattcgttacaactagacatttgaaagatagacttgaaaaggaacttgaagtaaatgttggtcttaaagttgaacctcttgatactactgatggatacaaagtttctggacgtggagagcttcacttatctatactacttgaaaatatgagacgtgaaggttatgaagttggtgtttctaaacctgaagttttaatgcataaagaagatggaaaactaatggaaccaatagaaagagttgttgtaaactgtcctgaagtttactctggtactattataaatgaattaaacatgagaaaaggtatgatggagtctatgtcaatagaaggagactatgtaaaaatagagttcttagcacctactcgtggtcttttaggatatcgaagtgaatttataaacgctactcgtggagaaggtactttagttcgttcatttgaaaaatttgaagaatttaaaggagaaataccttcaagaggaaatggtgttttaatagcacaaggacctggtgttactatggggtattctcttaatgccttaagtgatagagctgtaatgtttgtagaccctggtgtagaagtttacgaaggtatgataattggtatgaattccagaaaagatgatatggtagtcaacccttgtaaaaacaagaaaatgagtaacgtacgtgcttctggttcagatgatgctataaaattatctcctcctagaatatttactcttgaagaagcactagagtttatagaagatgatgaattagttgaaattacacctgattctataagacttagaaaaagattcttaaatgaacatgatagattaagatataacaaatctagacaaggtaaataaaacgtacatttacctctaattaacaaaatagccatatagtactgaaaaattatttcagtttatatggctatttttatttgaaatttatattattcaacatttatataattagctgcttgaacggctgcaatagctccatctgatgctgctgttattatttgacgtaaaaacttagttctactatctcctgctacatatacaccttctactgatgttgtacaagactcatctgaaattatatatccaccttcatccaaatcaagaacattttcaaacattttattattaggtttaagacctatagcaataaaaataccactaacatctatagttcttttttcttcagtctttaagttttttacttctattttcgatacagtcttttctccttctattttttctacaccatgactgtaaagtatctcaatattctctcttgctttcacagatttctccaacacttcttcacctctaaaactatctcttctgtgaattaaatacacttttgtacaattattagctaaaaataaagcatcttctagtgcagtatttcctccacctactatagcaacttctttatctttaaaaaaggctccatcacatgttgcacagtaagatactcctctacctgtaaattcttgttcccctgcacaacctaatttacgtctttcaactccatttgcaagaataacagcctttgctttatgttcacctgaagaagtttttacaacctttacttttccctctaaatttatctcttcaacctcatcaaactgaatatcaacaccttgagcaactgcttgattgtatatattattagaaaattctaccccagaaatcttttgaactgctggataattttctacctcagaggtacttgcaacttgacctccataaatatttttttcaaatactgtaacgcttaaccctgctctcatagcataaattgctgaagttaaacctgctggtccagcaccaattacaatgatatctaccataatgtttacctctctttatattattatttcttatatattattctcatcattcttatactttactattattatccatatatactacaaacaaaacattattttttattaattaactttattttacatatatataaaaaaactgcaaataaaaattaacttttatttacagttctcacttatttatataattcaaaaccttattggttatcatttacagtgtcttctaatatattgctttctgatatatatgatagaattgaaagtccatacataaccaaaactaatgctgctgttataagtactattcccatatttaatacctccttttgtttacagtatactattattatgtgaaatatttatgaatttaatttgaatatatatgtaatttcacactaacaatttcttcaaattaaacattattaactatatacttttgttgaaccaattatgattaatagtttaaatattagcactatttacttatatttatatgatataccatataattacatttttcaaattaaagttttgtaaactttttttgtaatatagtgtagtataaaattgtaatattacagatatttaatagttatcttttgattactttcattaaaaacagcttcatcactatgaaaatctaggtttttaaacttttaaaaaagttaaaaaaatatttttctaatactcaatttgattacaatttttttacaatttaaaaaatattttttccaaatttttatattaatacttgactttgtctgttttataaactagaataattaataatattaagaatattgaaaggcattgattaggaagagtaaatctgaatcgattaccagagaaggaaactactagctgaaatgtttccctaattagaaggattgaaaactacctaggagcttctatccgaagttatcttaatgattttagtaggaatagacgtttttattacttgcgttaaagtatcaagtggattttttaaaatcaatttgggtggaaccgcgggaaacagattctcgtcccttttttagggatgagggtctttttttattacctaaattcggtttttaaaatattctgtatctaatttaattagctaattaaaaatttaaaatatatggaggattataaaaaatgtattattcaagtacgagaggcaccgaagaaaaagtaactgcatcacaagcaataataaaaggaatatcaagtgatggtggtctttatgttccaagtgaatttcccaatgtaaaaaatgaacttataaatttagtaaatttaacgtattctcagatagcattttttgtacttagtaaatttttatgtgattttactgaagatgaaattaaaaattgtatagaaaatgcatatgatgaaaagtttgattgtagtagtatagctccattaaataaagtaaatgatacttatttcttagaactatatcacggtccaactttagcatttaaagatatggcacttactataatgcctcatcttcttaaaacatctataaagaaagataatttagagaaagatgttgtgattcttactgctacatctggagatacaggcaaagctgcacttgagggatttaaagatatagataaaataaagataattgtattcttcccagaagatggtgtaagcccagtacaaaaacttcaaatgaaaactcaaactggaaaaaatacatatgtagttggtataaaaggaaattttgatgatgcacaatcaggtgtaaagaagattttttctgataaaaaatttaatcaaaaactattggataataattatatattatcttctgcaaattcaattaatataggaagacttcttccacaagttgcatactatttttattcatatatgaaattagttagcaatagtgagataaatttaaatgataaaataaattttgttgtcccaactggtaattttggtaatattctagctggatattatgccaaacaaatgggtcttccaataaacaaattgatatgtgcatcaaatgataataatgttctttatgatttctttaaaactggtgtatatgataaaaatagaacattgaaattaactacttctccttctatggatatattaatttcaagtaatttagaacgattactgtttgaaatatcaaatagaaatactgatattgtaaataagctgttatcagaccttagtgataaaggagtctacaaaataagtgatgatatggaaaaaaatttagcctcattctatggagaatattcaaatgaagaagaagttaaaagcacgataaacaatgtgtttaaaaattataattatttgatagatactcatactgctgttgcatacaattgttatgaaaaatataaaaaagaaacttctgataacacaaaaactgttattgtaagtactgcaagtccattcaagttttctgaagatgttctaaagtctatagattgtgattttaaagaccttgatgactttgctataattgatagattatcaagtatttctaaaatagatattccaaaacctattaaaaatcttaaaaatgcagaaatactacataaagatatttatgaaaaagatgaattaaaactagctataaaaaaattcttaaaggtataggtgattattatgttagagattatagttcctgcaacaagtgctaatataggtccaggatttgattgtcttggaattgcgttaaatatatacaataaattttatgttgaagaaattgaaagtggtcttgaaatagaaggttgtgaagatgcttacaaaaacgaaaataacttagtttatacatctatgaagtacttttttgatagagttaaaccagaaaaaatacctgctggtatcaaaataaaaatccacagtgaagtacctatatgtagaggtcttggcagtagtgcctcttgtatagtagctggagttatagctgcaaatgctctatcaggtgctaatttagataaaaatcaattattaaatatagcttcagaaatagaaggtcacccagataatgttgctcctgctattttaggaaatatgatcgtatctgttactgataatgagaatatacattatgatattataaaaattcctgaagaacttaaattttgtgcaatgatacctaattttaagttatcaacagaaaaagctagaggtgttttaccaaaggaaataccatattctgatggggtattcaatgttagtagagttgctttactaatatctgccttactaaacaaaaactttgacctacttaaagtagcttgtcaagacaaattgcatcaaaattatagaggaactctaattgagaactacaatgatattgttgaaaaatctgaacaattaaatagtattggagtatttttaagtggagctggacctactataatgtctttaataaaagaaaatgatgatagttttgtggataatatgaaaaattacctacaaaaactaaaatctgattgggaaataaaagagttatgttgcgattctaatggagctgttttaaatataatataattatcgtcttctatacaaaatataactactcttttattataatttgtagtataataattaggactaggtaataatattaagtattataatctagttctttaaacatgtttacattgaggagggattatcataaaagagttaataattagagatttagttgcaaaagttcctataattcaaggtggaatgggcgttggtatatctaggtcatcactagctggtgcagttgctaagcttggtggtgttggtgtaatttctggagttcaaattggatatgatgaggaagattttgaaactaatactataaatgcaaatttaagagctataaaaaaacatatttctaaggccaaagaaatctcaaatggtggtattattggtattaattttatggtagctatgaaagaatatgaaacatacgtaaaggaagctgttaaagctggtgtagaccttataatatctggagctggattacctaataagctaccatcattagtaaagggaagtaatgtaaaaatagcacccatagtttcaactgcaaaagctgctaatgtaattttaaaaatgtgggatagaaaagagaaaactactgctgacttaatagttgttgaaggtccaaaagctggtggtcaccttggatactctaacgaggaacttgataacatagattctatagactatgataaggaatttgttgaaattttaaaggttgcaaatacttatggagaaaaatttggtagaaacataccagtagttgctgctggtggtataacttctagtagtgatgttaaaaaatatatagatatgggtgcaagtggtgtacaagttggtacaagatttgttgctacttacgaatgtgatgcccatgagaactttaaaatggcatacataaatgctagtgaagaagatgttcatatagttaaaagtcctgtaggtcttcctggacgcgccataagaaacaaatttatagaagaagttaaaataaatcgtccagaaataaagaagtgctataattgtttgattccttgtaatccaaaagaaactccttactgtatttctcaagctctaatcaatgcagttaaaggagatgttgaaaattcacttttattttgtggaaatgatgcctataaaattgataaattaagtactgttgaagatgttatcaatgaattgatttctgaattataatttaaagaaaactaaattaaaattttatcaagctaaggagttttaatacgttatttattaatctttataaacatatttatgtccttagcttttttgtgtcaatttccttttattgaaattttaatttaattagagatagtattaacccttataactaatcttcttttacaagtacattggttatttcagctatatataaagtatgataatctttttgtggataccatcttccatctataccttcagcaataaaacattggggttcaagtttctgactataaatttttttgcatataatagccattttagcttccttaaaataaggtgtatcatttaagtgttctatattaaatccaatctgtgatatcttatcctcttctctaccagatacctttccacaatatgaaagctctttacgaaaatcttcatcaaaaaatgtaagagaaaatttatctgtattatctataaattccttagtataacgctgtggtcttattactacaaaagcaacatcttttccccacataactccaagtcctccccagctagcagtcattgtattcactttaccttcattttctgctgttataagtgtccaatctttacctatcaatccaaatggattatttttaatctcttctgccaaaatttctttaaaatcactcatatctctaataacctctcattctcttatatttatattccttttattttcgtgataaattataaatgaagtctagttttgaaaataaaatacttttttaaatatattattgcaaataagtaaatatatatatacactcttattttttaatatatttaataatttcactcagaatatatatattctttactcaaattaaatataacttatatactttatgtgtaaattatggtaaaaatattatttaatcaaatcaaaacttgatttatatacctggaaaaggtattatattaaagagtgcttaaaatacgcatttcataaatagctatatataaaataataaataaggagagtgatgggcaatggatactagtccgttgcggagagaattttttacattttcatcacttaataatatctaaaatcaaaactaatacatatattcagttatataaattagttaattaatagatactattaaatgatgagatttatataaaactgaataaaggatgtgttgccatgataagatattacaaaactatagattcaaaattagagaaacttagtttttttgaagatggctgttggataaatcttgttgaacctaatcatagtgaaatcaacgaaatttctaatttattaaatatagatgtagaaagcatagaatctgcactagatgaagaagaacgctcaagaatagatgttgaagacaatcatactcttatacttatagatataccagtagacgaaagtgactctaattcttctcattatactacaatacccttaggtattatactaactgaagaagctattgtaacagtttgtgatgcacagactaagattttaaatgactttatagttggtcatattaaagatttttttacgtttaaaaagactcgctttttgcttcaaattcttcacaaaaatgcagcttattacttgcattacttaagaaaaataaataaaatgacaatcataatagagcgagaaatttacaaatcaatgaaaaacaaagaattggttcaattattggaattagaaaaatctttggtatacttctctacctcactaaaatctaatgaacttgttttaaacaaaatggttagaactgctggtataaagaagtatccagatgatgaagacctattagaagatgttatagttgaaaatagacaggctcttgatatggctaaaatatatggagatatattgagtagaattatggatgctttcagtgcaattataagtaataatcagaataatgttatgcaaattttaacagtagttacactaattttctcaatacctacaataatatcaggattctttggtatgaatgtcatcaacatgccattttctaataacccaaacggattttggataatacttcttattacctctataatatgtatagtgattacatttttcatgtcaagaaataagctattataaaatattaataaaaaagccattagaattaattgatttacatttatcctaatggcttttatatatttaaatctatataatcttataatactttttaactatcatgttcttcatctataatcatttcagtttcaagcccttctagcattgaatctaaactttcttttatatttagtatataaattggtacatactcttcttcatctattacctcttcttgcaacttaaatggaggaattaatacttcatcaaagtctatatttaaattgggaaagccttctactatctcttcacaattatcgtactcttcatttgctaaagaaatgtacatatctaggctctttttataataaagacctgcaagcatatactcacacttcttacttccatatttaataccttctttataatatttctcagcttctgcgtcatcatttaattttaaataaatttggcctaaattatatattgattcaacacaaccttgtgctctagccttttcataccaaaatttagaatttacataatctttatagaacatatcataaattaatcctaccatatgttgagcgtacacattattttcattggcaggtgtatcaaacatcattttagactcttccaatttaccttctctaaaataaattctacctagatgtatacgagcattcatatgatttttgctacttgccatttcaaaatactttctagcattttttgtatttcctaagctctcatatatacaccccaatctataactagacctcgtatctccattttcagatgctttcttataccaacttatggcttcttcaatattatttaaatcttcatagatatttcctaatttgatttgacaagatgcattatttggaatcctcgaataatacgaaatcgctttttctatatcttgattctgataatataaatccccaagattttcaagggaacttttgcatccaacagctatagcatcctcataatatttaatagcattttcataatctttttcttcaaaatatatacctgccagattattttttgcttctgttatatcatcttcagcagccattttataataagtttttgccttctctatctcattttctctattatataaattagcaagtctatacttagaaagtgtatgatttttttctattgctttctcataataataaattgcatctcccagctcttcttttctatcatatacatatgcaagcctatactcagacttcacatcatctctatcagcactctttttataatacttctctgcatcttctaaattatcatttatttccataatcatacccaagttaaagcaacctttcatatgacctgacttgtacaactgtttatataaacttactgttgatttattatctttcttttttccatttaatattgctaaattatattttgcatcatcatctaaaagcacagaaccttttttatagtattcatatgcttcatcatctttctccaaaaaagtatataatacccctaaattaaaacaagctttacctaaattcttgtctgctgctgtttttaaccatttttcacaccttacaaaatctttcattttaaaatggcatacacctaaattattttgtgcttgtaaataacctaaatttgctatcttttcataccaatatatagcatattcatagccatctaacttatagtacatattacctaaatcaaaagcagcatcttcacttccacttttatatgccattgaataccacttttctgcttctttaaattgttttttactttcatatatatttcctaaagtatattgagattttacgtaattatccaatgcagcactcttatacaactctattgcgctttccatcttacccatcttttcaaggagggcacccttagtatgtacgactttcgggtcattagatatattttttattttttttatagaaaattttgtatttttcattattcgctacctacccattttataaaatatattctctcaaacattattatacattataatctataattaatgctataatattgaatttttaccttttgtcactatattgtaacattaaattttaaattttataatcattagattttattatgtaattggtatataatgtatatatagggggggacattttatgaatttcagcaatatttttatccaagttgcagttttatttataattattttagttggatattttgtcagaaaattcaacttattagatgaccactgcacatctaagctttcaactttgacaatgacagtttttttaccatcaatgataattagctccatgcaaattaactttgatagtaaaatgatacaaaaaatactattgttattatttacatctttgattatgtatatagtttcaattataattgcatttttattgaaatacattttaaaatgtaatgataaaaaagatttgggaatatatcagtatatagttgttttttcaaatgttgcttttatgggttatcctgtaattgaagcagttttaggtcatgaagcaatattctatactgcaatattcaatttgccttttaacttattttctttcactttaggaatttatcttttatctaaaggcagtacaagtagaggtttttcaataaaatcacttataagccctgctacaatagctattgttattggactttttttatttgtaacaggacttaggttaccccaatttataaacgagccacttgagatgttgggaagtataactacaccaatatccatgattatcattggaagcttacttgctaattcttcagctctcgattgttttgtcaacaaaaaattatatatagtcacttttataagattattggtacttcctgtgattgtgtattttattctaaaaggatggataaatgataagatgattttagctataccagtagtaatttcttcaatgcctgctgctgcaaatactgctataatggctaatcaatatgactccaatataacactagcttcacaatgtgtgttttttacaacactattttcagttatatctataccttttataagtattttactcttatcttgatttatttttttatgtattatataataacatattcaataaattacaaatataaacattttattgtagtatattgatggaattttttcctagatatttgtcaataatatctatatgtattatagaataggaggcttaaatatggatatggatttactctttaaaatagtatttgctatagttgctataggtgtttctgtaaaaatcattaaaactgttgctagtttagcttttaaaatagcgttgatattgctaataattttatttgtatatagaatgtttttgtaaacatttaaaaataagttttttaatacaatagagaagtaaaatagattatttttaatgtaaattttttattaaagacactctattttacttctctattagcttctttaaattaaatttttattatatcttcccataatataaacatcttcaaattttccatctctgattacagcatattttttagttccctctatttcaaaacctagttttttatataaatttaatcccttttcattatctacaattacttctaatcctactctagttaacataatccaattatctgctatatctaaaagttgttccataagcttcttacctactcctcttccctgataattctctgcaacacttattcctatttctgcactatgtctcaatcgtggagaagaatttacatgtaacccagcaaaacctattacatctttttctccattattattagtttcagctacaaacatataatcattttctcccaaagaagctaacatagcttcagttttatcgactctgtcactcattaatgccaaagtatttctcataacactgtatgttcttctaatttcattaaaagcttgtgcatcttctcttcttataggtcttattgttatatctataggcttactcatattggattccccctcaaacataatctttatttttaattaaaattttacatctttattttatactgttcaaatctatgtatgcttctacctgaggtacatatatcatattatcttttatatgtgtacttccaaattcttttaattctgtaccttctttatccttagttattttatatctaatggattccataccttcaactacttcagcatgaaaaaacataccttcatattgtttaaatctaaaattaaaattgtctttagtaagttttattatcatatttttatctactccttatataattgatatttttcttattattagttgtatatatactgcttattcatattaatatattataacttatcatttatttagtataaagttataaatagatatatttatacttattttacaatctttcttcaattgatatataatatgtttatataaactaatgtatgtgaggtgaaatatgagcaaaaaaacaaaatatttttctttaattctctttcctattgctttacttttaaattttatagccagcaaagttccaaatattgttgaaaaatattactcccaattcatagataaaataattgtacaaatattgagtaaagtttctggaattttcccattttctctctatgagattacaatgtacataatagttatatctatcttcttatttttatgttgtactttatctacaatttttaataagaaaaaaaattaaacatatttttaaaaaattccattttaaatatattatccattgtatcaatagtctactttctttttgtagtgctttggggaataaactataataggattccactagaaaccacacttataaataactataatttaaaaaacaatacctctatccaatcaaaacaatatagtgttaaagagcttactaaattatataaattccttgtaattaaagcaaatgaaactagaaaactcacattacaagataaaaatggtattgtaaaatctaatacagattataatggtgtcataaatagagctcaactaggatacgataatatcttggatatattacctagtgttagtggtagttattctaagcctaagtatattatttcatcaaatctaatgtgctatacaggaataactggtatatactttccttttacaggtgaggcaaatgtaaatatagcaatacctgacttatatattccttgtacagttgaacatgaaatagcacatcaaaggggatttgctagtgaagatgaggctaattttatagcgtatcttacttctataaaacacccccatattgattttaactattctggatatattttagctttaaattatactgcttctgctttaagtaaggttgattataatgcatatgttgatatttctgctggcatttcagattctgtccgtagagatttaaaaaatgaaagtgaattttggcaaaaatatgaaggtaaaattaatgaaatttctaatgagtttaacaattcttacttaaaagctaatggcgttactgaaggtactcagagttatggtaaaatggttgatttattgctaacttattatgaattatatccatataactaaacactacaattcaaaattttattcatatacagctgatattaaatcagctgttttctatttaaataaattatttaacttcaagcaatcttatataatttgatagtacttatactatctgtataacatttcaattctaactattttagttaaaacatttctattatcttttttaataaatgttttaactaaaatttttaaaacataaaacttccacattatttcactatctatataaaaatctaaaaattcacatataaaattacataactaaaaaatcataaatttatagaaaacatatattcaaaataaaaaagcatgtatcaaaacttgacacatgcttttttattttgaatatataccattttgtcacaataaaaatttccttgtaacactgatatttttaaacaaaatagtccttatttaattaaattaacattaattaaattcgtactcattttgctatcattaaacattacttatagtaattttctaatacactatttgaaacttccttcccttgaaaacttttcaaccaattctcatatgctgaatttttccatatactaccatcattaaatgttacttgttttacacaagatataatgtactttacaccatgctctccagttgattgtttccatttatcaaacaatagaaaggcatcattttgattcttacctggtgctattgcattttgctttgcatattctttctccatttgtttccattctttcaaccaattttctacccatgccttgccttgttgtttttcaaacatacttattatatcctgtggtggtgattgttgcatttttctataagtatgtgaatatgattttggagacacaggagatatgcctgtaacaataccatagtctacaccagctgggctaaatccaacacttcctacttcgccatctgctgccacattttgagcatcccaatatagctcaagtggttttccatttttatcatatgctaagcatgtaatctcataatccataattgccttttcactgctatttgttaagcttataacattgctaggccaatgatatggagtatcatcatactgtattttgctattatttataaataatggaatattctcattataaacaagacctttactactttgaatatcggatactttctttgtgacagtacttaccgtacttgctaagtatacatttgttttttctgaattggtcgtactaagagaaaatgttgttgtcgttccagtaatcagcaaagcaacaactaaaataggtaagctagatatttttttatatctcacagttcttcacctctttttctattaacttataataaaacaatttaccaaaacattaaaatctatgttaacataatttaccaactgttctagtaactatatcctatcatagttactatcaagtttcaatactattgatggaaattttcactatattaaatctttttttaattttataaatttacaatatgatttaactcatacatatatagtcaaattagaatataagtttcttacatttaatgaagtttataaaataaaaaatgactagataattaaatactgtaaataaaaacttattacaaaagtatttaaaaatctagtcaattaatatatatatgaattgtatactataatttttcaatctcttctagcaactcatcaactaatttgttaccatcaatcattctaactatttcaccctttttaaataaaagaccttcacctttacccccagcaatacctatatctgcttctctggcttcaccaggtccatttacagcacagcccataattgcaacagtgatatttttttccatactaccaatcttttcttcaacctcatttacaacactaattaagtctatattacatctaccacatgtagggcatgatataactttaatcttatcatttaaaagtcccaaacttcttaaaatctgtttaccaacaataacctcttcaacagggtcgcctgttaaagatattctaacagtatctccaattcctttaagaagaagtgctcctacccctatagaagactttattgttcctttgtgaacacttccagattctgtaattccaatatgaagaggataatcaactttttttgatattaattcatatgcatcaacagttttataaatatcggatgattttagagatataactatattatgaaaatctaagtcttcaagaatcttaatatgtcccattgcactttcaactaatgcttcagcagttgcagagccatgcttttttaaaagttctttctctaaagaacctccattgactccaattctaatttttaaatttctttccttacatttctcaactaccatcttaactctctctctacttccaatattaccaggatttattcttattccatccacaccttgttctatagcttcaagggctagcttataatcgaaatgtatatctgcaataattggtatatttacactagactttatctttgctatattcttagcagctttaatatcaggaacagcaactctaactatatcacaaccagcttcctctagtctctttatttgagctattgtagcatctgcatctcttgtatcagtatttgtcatagattgtatacttataggattttctcctcctatttttacagttcctacacttacttctctcgtctttcttctctcgtaactcatattccacctctatatattattttatattgaatctctttaaatagtaaaatattataacctacatgtatattataaattaaaaagctatctagttaaataagaataaatttcatacataaaaattaatttattcttatttaaaactacatagcctattttcttaaaatctctaaaaaactaaatcattgaaataatcttaatatatctttatatgtgataaaaagcataaataacattaaagctccaaaaccaacaacatttatcatgccttctttgtttgggtcgagttttttaccacctctaacagcttctagtaatagcataagtattctccatccatcaagtgctggtattggtaatagatttactatacctaaatttaagcttatgacagctgctaaatacactacatttatgatgcctgtacgagcagcatctgataccataccaataacacctactggtcctgctacagcattgccaatccctcctggtacacgtcctgtaatcatttgacctagaaatgttaacatctgttttgtcatatctacagtagttttacatgcatttactattgacgccaaaaagtctttttctctttgtggttgaatccctatttcatactttccattgttatttttaggtgttacatttacaactttattacttccatctctagttatactaagttttaattctccaccagaagaagtgtttattatatttgcaacttcatcccaagtcttaacagaattaccattaattttatttatcttatctcctacttgaagccctacagcctgtgcaggagtatctggcattatctttcctaatttagtcgttggagaacctatatacaaaaatactggaactaaaagtattgctgctaatattatattgaatattggtcctgctacaatagtactaaatctttgtaatatagacttgtttccaaaagaatttggacttatttgttcttcatcttcaccttccatgctgacatatccaccaattggaagtgctcttatagaatactctgtatctttttttacactatatatcttaggccccatacctatagaaaactcatttactttgataccacttctttttgcaaatataaaatgtcctaactcatgtattaatacaattatactaaatagtattaatgcggctattatagtcataaattcaccttcctatttttttatcagatttgcaacataagctctactccatctatctgtttctaagatttcttctaatgttggttcgcttatgctactatgaacttctaaagtcttctctatgtaatatggtatgtcataaaaaccaattttatcctctaaaaattcacttactaaaacttcatttgctgaatttaaaacagaagaataagttcctcccatttttaaacactcataggccaattttaaacatggaaaagtttctaaatctggttcttcaaaagttaaagtactaaattttgaaaaattcattctttcaaagctactttccattctatctggatatgtaagagcatactgtattggtagtctcatatctggacaccctaattgagcaattattgagctatctgcatactgcaccattgaatgaattatgctttgtgggtgaactactacatctatattttcttgttctaccctaaacaaccatctagcttctatcacttcaagtcctttattcataagcgttgaagaatcaatacttatttttcttcccatactccaatttggatgcttcaaagcttcatttttagttatatttacaagttctccctttttctttcctctaaatggaccaccagatgctgtaagtattatcttttctatattttttttattttctccatttagacattgaaatatagcactatgttcactatcaacaggaagaatatttacattgtatttttctgcttctttcattacaagttcaccagcagttaccaacgtttctttattcgctaatgctatgtctattcccttctttatagcacaaagagttgggactaatcctatcatacctactacagcagttaaaaggacatccacttcatcaagtgatgatattatttttaatccttccattcctgctaaaacttctatttctatatttttaggcaacatttcttttaatttcaatgccttattttcctcaaaaactgttacatatttaggtttaaactctactatttgttctagcaataattcaatattactgttagctgatattgcaactatctcaaacttatctctatgttctctaaccacatccaaagtttgtttacctatagagcctgtagaacctaaaattgatatctttttcatataataatcctttctaataataaatataccctgtcaaaacattataacactactaaaacaattatttttactattcatagaaatttcatatattattccacagattaaaattaatctattattttttgtatcttgtggaatattataaaatattctagtattattaaatgcccttttttatttccacaacatcttctattttacagtctagtgctaaacatatcttctccattgtatccatagaaacagatttatcatttcctagtctgcctaaaacagaaatacttatacctgatatatttacaaattccattttctttatttttctgtcaattaacaatttccataatggagcgtatgaaatcatgttatcacctcgcaaaatatattctatcacattttatctattttggaaaattttcatctatttagataaataattatttatctaaatagatttcaattatagtttattaaatataaatatgttaaaataaaacaaaaccataagttcaaaaattaagctttatatatatttatctcattattttactaaaacataactatataaaaaatatttactattatatatctatttaaaacacatcattatagtatcatataaacatatgtaaatatataattaaaaaagctaaaaattagtaaatttataaaaattatattttgaataaaaggagaaagaatgttgtatttattaaaaattaatcaatttgaaagaagctatgatataggaatttttaaaaatgaacaatcaatatataaatttattgaaaaaataccctttgtaaaaaaagataatagtaattttaattatacaaattactatatggaatttgaagatattcctgaatattatgaagtaaatttcaataattatttatatattattaccaggttttcattcattccagatggaactgagatattttttacttgggaagaaatccattattgggatgaaaaagttgctaccgagaaaacttttataaatggcgaaacattagtggattcatataactttccaaataatgaagtgaaagactacatacaaaagcgagaatcattatatatagaaacaaaaaaatattatgaagaaaaaggattaaaaattgagagacatgcactcggttcagaagatggtgaatatgttgaacttacaaatgattctatactttatttactagatatagaagcagttgaaataagagaacaatcaaaaaatatagaagaatttctatataagtacaaaaaacgttttaaataatttatattttaaaatacataacaatacattgagtcatttaacgaaatataaaatgactcaatgtatagactgataaaaataattatattattttttagttacatatttgttaaaaaattctttttcttctatcggtttagagaaataaaacccttgtcctacatcacatttaactgtatttaaaaattccaagtcttttttagtttcaataccttcacatacaacagacatgcctatacgatgtgacatttcaataatacactgaataatactatatactttctcccggttaaatgtttctttaagtaagcttttatctaacttcaatccattaatagatagagaacataaaagacttaatgaagagtatcctgatccaaaatcatccatcgaaattaaaaatcctaactttttaagctcctctaaaatcgaaataactggttgagatatttcattaaaagcactttcagttacctctatctctatatacttaaaaggaatttcatattctttaacagtatctaaaaacctttgataaaagctattttggtaaatagtaacccttgaaaaattaactgcaatcggatatgtatattgattttttttcataaacgttttttttacaaatgaacacgctttttttaacatataaaagtccaattcaataataaatccacttttttcaaacaatggaataaattcatctggtgataaaaaaccaagttctggagaaaaccatcttacaagagcttctgcgcttacaacatttaaagaagatatttgaaatttaggttgcaaatacatatgaaattcttcattttctatcgctttatacatataattataaatactattttccatttgtaactgttttaacagattttcattataccatactgtggaggaaattcctcttgttttacttaccttgtgtgcaatatttgccttatccattatagaattgatggatttataacctaaattatcaatttcaactaagtacgctcctatacaataagatatagtttgagttacattcatatctaattcagagattatagcattagttagcatttcccgaatatcctctaaaagagaatctctatattttgcaagtattacaaaattatctgaaccaattcttgcacaagtttctttgatattaaaagttttagaaagtgcagctgcaactattattagaactttatctccatattcatatccatgtgtatcattaatatatttaaaattgtcaatatcaatatttagcagtacatactctttgttagatgcattgtacaaaatttcaatcgctctgttttcaaatgcaacctgattttttatttttgttaaattatcagtataaaatattcttttaaacctttttttattataatattcccaaattaaaagacttattgttgagaatataagataaataaatagtgcagtagcaaaagaatacaattttgcattagagtgtttttcagatataaaaacaatttgattagacaacacagaatactcttcactcaatttatataatttatcacctgaagcaccatttctaacttttataatttctttcttcatagattcccacatagaatccatttgatttagtttttgttgaaattctttattatcacatctttgaaatccattttctccattacctgttcttagctttatcagaatattatccagtcgttttatcaagtcatcatttctttcattattcaattcttgcttaacaaccttttgagtttcactgcgaatagtaccagtgtgacttataattttaatatgctctatactatgatatagagaaaatataaaaaaaataataataactagccaaatagcagaataaattaaaaaatcatattttttcttcattattgttacctcatttgtaatatatataatttgcaaataatcaatctcttataaaaaatgattatcaatattttacagtgatatgtatttatcttaagtagtttaatcatttataccctataaattatacaaattcatcacctccaacacaaacagcaatatacgtttttctaaaatttctttttaaacattcatcaacactatcattaaatcatttttaaattgctcaattaatttactgcatcacttcttttcttataaaatatcaccccaataatatatttgtataatgtctttatgtctctttttaaatttggcatatacataatctatattttaataaataattaaaatactatttacctacaatttaactctttgaatttattttatcatattatgtaaatatattccttttttttggtatattacttaaattatatctatttttgtgcaataagaccaataatttacttatttcttattaattatatttaaaaataaaatttataaatggataataaattagttacatttatacatatatattataaatatataataaagctaaaaatatcgaaattattaaacaaaaaaatattttttaatgatagttatagtataaaaaatatactcactacaaatatagtatactattataaagtaatacttattcttataaaattccccaaggtcttctaaatttttgaacaatgaaaatagccatgtaactaataactgcagaatatctctgcatttaaaagttacatagctattttcattactagcaattatagattgctcttttaaatccaaccaatctttatctaataaaaaatttaatcgcactatatacaaaaggtgcaactaatataacactatcaaatctatctaatatacccccatgaccaggtattatctttccataatcctttatccctacatatctctttatagaagatgcaaataaatctcctaattgagctattacacttcctatacttcctattatcgctaattgaagcaaatcaatgccaaataaatatccaaataaaatacaacaaagtgtacttcctattattcctccaatagctccttctatagtctttttaggactaactttaggaattagcttatgttttccaagtaaataaccactaaaatatgcaaatatatctgtcataaaagatatcacaaatataagccatacatatatactacctttttcaaatccatttatagttataattataaaatctaaaaatactcctatataaaaaactcctaaaaacgtaatcgaaacatctataacattgtttttgcccatcaacatataaattatacttgctaaaaataaaataaaaattactgcataagtatattctaatggtaaattaaaaatattttttacagctaaataaatagaaaataaatatcctataatgaatattggatgtacatcttttattttaaatgccttataaaactcatgcaatgcaatataaactattgctgtctcagctatatatagaggaatacctccatatacaacaaatagaaataatggaaccagagctagtgaagcaataattcttgtaagcataaaataatctccttacttaagtcctccaaatcttctatcccttctttgatatacgtatatagccttctgtagttcttcttttttaaaatcaggccaatgtatatcagtaaagtaaaactcagaataagcaacttcccaaagtaaaaagttactcaatctttgttcaccacttgttcttattaccaagtctggatctggtatagactttgtgcttaaatagttttttataatatcttcatcaatattgtttatatctattttaccactttcacaattttttactatatctataagagcattttttatatctgctctacttccgtagtttaatgctaaatttaagttaactcctgtattgttttttgtcagttccttagctgagtttaattctcttatacaagtttttggtaaagcacttatatctcctatagcagttacttttacattgttttggtgaagttcagctatttcatttcttaagtatgtagataataagttcataagtgtgtcaacttcaagtttcggtcttttccagttttctgttgaaaatgcatataatgttaagtgcttaacacctaattttgagcattcttttactatatctcttatagtttctactccagccttatgtcctgcagttcttggaagaaatctagcttttgcccatcttccatttccatccattataatagcaatatgagtaggtatgttatttaagtctatatcatatataatgttgttattcatattttgcctccaatattgttctgactccttaaactaaggagtcagaaaagtatgtgattatcagttctacactatcacctatctcagatatttttataactctaggaactacaagtttttctttatcctttttaccttcaatagattttacggtataatttatattttgctcatcaaaatattgttttacctcatctacatgaagacctaaaaggttataatattttttcaatattatacctccattatgtccttttcttttttagataataatgtatctatttcttttataaatttatcagtcattttttgaacttcatcttgtgctttttttaattcatcttcagttaattctccgcctttttccatctttttaattttctcattggcgtctcttctttcatttcttattctaactttaaattcttctgcagctttactagcttttttagctaattcttttcttctttcttctgttaaagcaggtacagaaagtcttataacctcaccatcgtttgatggatttaatcctaagtctgagttagctatcgctttttctatttcatgcatagcagatttatcccaaggagatatcattaatattcttggttctggtacagatatagcacctatttgatttattggagttggagttccataataatcaactcttattttgtctagcatttgtgcattagctcttcctgctcttatagttccaaattcaaactttaaagcatcaattgtcccattcattttctcttctaattgcttatgtatttccagtttcataattttactcctccttcattcttcattattttacagtagttcctatattttcgccttttactgctcttattatattctctgttgtaagctcaaatacctttattggaattttattatccatacataaagatgtagctgtagaatccattacttttaattctttctgtataacttccatgtaacttaattctgtaaatttcttagcatctgcatgtacttttggatccttgtcatatactgcatcaacatttttagctagcaatataacttctgcttccatctcagcagcacgtaaagcagcagttgtatctgttgtaaagtaagggtttcctgttcctgcaccaaatataacaactctttccttttctaagtgtctaactgctcttcttcttatatatggttctgcaatttgtctcatgtctatagcagtttgaactcttgtagcaacatctatattttctagtgcatcctgtagcgccattgcattcataactgtagctaacattcctatatagtcagcagtagttctatccattccttcactggttctgcctctccagaagtttcctccacctactactacagctacttcaacacctatttcttgtattttttttatagcaatagcaatatcattaactacatcattatttataccaaaacctctttctcctgctaatgcttctccacttaattttaacaatacccttttgtacattggtttatccatcagaaacctcctatttcaatccttcatatccaattttttctattttttaaaaaagagaacacctgcgtgttctctctttggttattacttaagttgcttagcaacttcttctgcaaagttttcttctctcttttgtataccttcaccaacttcgaatctcacaactttaacaacttttatatcagaacctactgccttagcaacatcagcaactaattgtttaacagttatatctggatttttaacgaaagtttgctctaataaacaaacctcttttaattctttttctaatcttcctttaaccattttttcaactatattagctggttttccttcatttaaagcttgttgagttaatacttctgtttcatgtgctatgtattcagcatctacttcatctcttgaaacatacttaggattcatagcagcaacttgcatagctacatctttacctaattctaaaactttagcatctctagcttctgtttccatttcaacaagaacacctatttttccaccaccgtgaatgtatccagcaacttgtccattagttacaactttagcaaatcttctaaagtctaatttctcacctatttttgcaactctattatttaaaacttcttgtaaagttattccctctttatgagtttcacctaataaagaagctatatcttctttatcagtagctaatgccatacaagcagcatctttaacgaacactttgaagtcttcgtttttagcaacgaaatctgtctctgagttaacttctaccatagaagcaactgtattatcatcattcatttctattgcaactagaccttcagcagcaactctaccagcttttttagcagcttttgataatcctttttctcttaataaatctactgctttttccatgtttccttcagcttcttgtaaagctttcttgcagtccatcattcctgcgcctgtactttctcttaactcttttaccatttgagcagttatattagccattttttaagtttcctcctacttattctattccatattataaatggtaagggcgacccttaccatttaattgtcaaattattattcttggtcttcagctacttcttcctcagcaccttgtctaccttcaattacagctgttgccatagcaccagttattaattttacggctcttatagcgtcatcatttcctggtatagcaaagtctaattgttctgggtcacagttagtatcaactataccaactactggtatacctaatctatgagcttcttgaatagctatgttttcttttcttgggtcaactacgaacattgcacctggtaattcaggcatgtcttttattccacctaagtatttttctagtttttctttttcagctcttaattttataacttcttttttaggaagaacattaaatacgccttcttcttccattttttctaattctcttaatttatttattcttgtttttatagttttgtggtttgttaacattccacctaaccatctttcattaacaaagtacattccacatctttcagcttcatcttttatcgcatcttgagcttgttttttagttcctacgaataagattggctttcctgtttcagctacttctttagtgaacttgtaagcttcttcaacttttttaactgttttttgtaagtcgattatatatattccatttctctctgtgaatatatacttagccattttagggttccatcttcttgtttggtgaccaaagtgaacacctgcttctaataattgtttcattgatattactgacatatcttacctcctggttttatacctccagcttgatcttctccctaaaaaaccatgtaataggcaccttttaaggatcccaatgctgtgtgtgatttattttattttttcacctctagtagtatatcacagaggcgaagaaataacaatattttttccatattttctatttttatatttttttgtgtattttataccattttttgaatttaatttgcaaatttcatttttaattttgtttttaatgatacgttatctatactattattacttactatatctacacttccaagtaagtcacctgaactagtataatattttataacacccatagtatcaccttttttaacagggtactctatatttttaatcttaacttctgattttatactttcatcatcttttaatattgtataaagttcatcttttgcttttaatgtaacctctaactctttcattccttttatatatttcttaccaataaagctatctttatcaattacttttttcatattgaaattttcttttccatatttcagtagagctaatgaagcagaggttcttttatttttatggttagtacctaatacaacccctattactctacgttttttctcatttttctcatttttatttacaaccatagaaaatgataagcaatatccagcattgccagtatatccagtttttataccatctacttctggtataattcttaataatgcatttgtattgcttttttcaaaacttctatctgaatttgtatatgtctccatatcagttatagctgttacttgtttttcataatggtcaaacatgtattttccaagaatagctatatcttttgcagtagagatattttcttttgctggttttttggggttgcttaaatcgtatattggaagaccatttggatttagaaaatgtgtattactcattcctatttcttttgcttttttattcattctatctacaaatgcttctttcgttttacaaatatgttttgctatagcaattgccgcatcatttcctgatacaatcataagacctctcataagctctataagtggcacttcttcaccatctttaagtttataacttgacccttttactgatgcaatagatttgtctatttttaccttatcagtttcttttacttctttattttcaatagcttctattgcaagtaaaaaagtcatcatcttacttaaactagctaatggtaccttcatatcaggttctttactatataaaactctacctgtttcttggtctataagtatagatgtttttgaatacttgtctacagatttaccatctgcatatgaataatttggtattataaaaactagaatcatggctaatgatataattttttttagtgcatttttcaaatttttcaccttcttggattattaagtatatttatatttaaattttccctatttggtccaatttatatctagtaattaatacctatccatatttacacaaatattaccttatcattcttttaataatcacagatgcccaaattgctcctattgtaactccaaaaaatacttctatacctgccaatgctttcccaatcaaacttgtagcaaccatatctccatatcctactgtactaaatgtagccatgctaaaataccataaatccatatacattttgaaaatctcacttagtgagtaatcacctatattgtttatatctaaagctacaagtgtgctatttgaactttctatgcctacaaataagtataataaagcaaaaacacttattattgctataatcactaataatatattccatggcttttctccataacctgttgtgtaacgtgctatttggtcaaaaaatttttcaactaaataatcactgaaagtaggataattagaacgtttcattattttactactataaattctttccttataatagtaaaatcctatcatctcatattctccaatttttgttgcttgatttctagctattctataatttatcttgccatgctcatactcactttttccatattcaacattctttaacacaaattttgtacacatgctaaaaattattccatccattcgtggaaaattttctactttattaactaccaaatcaggtcctttaaatttcactttttcaaatatacggtcatttatatagtttttactaaatatggttctattaaaatcacagttttctaagaatatacaaccattaaataaaactttatctctaaattctgtatagttaaaaataatattctttttaaaaatatattttttaaaatttgctttttgtttaaatatggattcagaaaaatccagtattttataattgtaagttaatatttcttccgcattaaattcattttcaaaaacaaatccattaaattcacttatctcttctttatgaatagtatccatcatcaactgtatctcttcatcagacttattttctttatgaaagatacaatatccagaagaatctgcttctctatgacatttttttctctcatctatcttagatatccatttacaattcataaatatatatcctccagtacaaaacaattattactattttgtattagtttggatattattttattttatatacttaaatagttacaaaatatatattagattcttagttttaaatttttaatctacttcattgtgcttttaatttgtttcatataaaaaataataaattttatatactttgatttatttatatattaaatattattctaaaacttacttatcatttttaagtaattttgtaactatatttaatgctactaaatcatccataaatcctattgggaacacgaagtctggaatcacatctgttgatataacaaagtaaagtagcatacttccaatcaataaatatttctttattgtaagtccatctgtacaaaaatcagcatacatttgtcttaatctatctgtaaattgaccttgtttttcaatagaatctatttttttattaaaattatcaaaaagtaattttttaccttcatctgtttggacatataacttacacttacttaactctttttcaatatttccattaaagttcttatcattgattaaatttgcaaatccaagaatatcatcaaagttactaaaatcactatctgcattaaatatttgattattgctgtttctaaattcatatcctgaagctttcaacagttcttctaggttaatatttaaatgtattgccatcttttctaaatgatttatatttggcctttgtttattattagctatacgagatatagtagatttatcaattccactttttttacttagttctcccattgataattctttttcatctaataaaactttcaacaaatcaccgaaattcccaaccttactatgttgttccattattttcacctgctttattatgattggttttatattatatgatatgattcttttgttatttaggtgttgtatgatgttgaaattttatcaacaatttattggattatctgtaacaatttatccatttttacaatactataactaatataagtacaaaatttaagagaaaggatgttaatctactgtgattgaatcaattttattagttacttctctttgtatagatgcctttgtgacaagctttggatatggagtaaataaagttaaagttcccttatattcaaatataattatcagcgtagtttgttcagctattttagcaatatcgctttttgcaggtacaatagttagagattttttacctcaaaatataacaatgttaatatgtttctttattttatttttattaggaagtgctagactaattgaaagtttttttaaatcttattttaagaaaaaatctatacactcaaagaattataattttaatatgttagaccttgaattaaattttaatgtaagtatcgaacctgatgtcttagatacaagtaaatctaaagtgcttaaatctgctgaagcatttacacttgcacttgctttaagtttagatggattagctatcggttttggtagtggccttgtaggtgtgaattatatacaagttattctattttctttaatatcaaatataattgcagtattacttggttgtttactaggaaatatgtttgttaaaaacgtaaatttaaacttatcttggttaagtggtttaatcttgttagtcattggatttatgaagatatgttaataagaaagcaatctaaagataaacttttctctttagattgctttcttttgtgctttttatatttattttctattctctctaatttctttctgaatctttttaagagctttttttgaacctctttgaatatctttttctaattttctttctttaaaactagtaaataatacatctaaatcatacccttctggatacaattctgatgcttttatgctaagttgtaatctttttatatttactgaaataaaattatcattaaacaatacttctacattattaaacttgtccataggcttatatacaattccaaaatcatcttcatctagtaattttaccttatcccctacattataatctgtatagcttaaaatgacttcagaactatttttatcttcaatattagattgtagcttacttcttttaactaaatctaaattgtagtttctatcaattacatattctttagctctatctaaaactctattttttattcccatttttttagaaataaaaagagcattactatcttcagattttccaatagttaacttatacaatggttctaacgtttctttatcaaacatcataccagcattttcaaattctggatgtaatgtagcaaacttttttatctctccataatgagttgatgctatagttatacatcccattttgtaaaactcttctaataatgatattgctaaaccagctccttcattaggttcagttccacttcctatttcatcaaacagaacaagagtagaattatttgataaactcataatctctgcaatattttttatatgtgatgaaaaagtacttaaggcattttcaatactttgattatcccctatatctacaaaaactttttcaaatacactaaattcactaccttcttttgcagaaatatcaaatccacattgaaccattaaagttagtaaaccaacagtcttaagggttacagtttttcctcctgcattaggacctgttattataagacttctataatttttgcctatttcaaaatctaaaggtactgcatctcctgttagaagtggatgtttacctttaattatttttatatagccattattatttatttttggagtaattccttttattttttgactatacttagcttttgcaaataccatatcgtattctgaaagtatctctatatttaattttatctgacttatcttctcaaatataagttctgttaaataagataatattttgtattcttcaatagtttcatcagcttttagcatagttaactctgtacttaaatttgaaacactaataggttcaataaatacagtatttccttttgatgatgtatctaatatagtaccattaacttcatttttataagaagatttaattggtattacatatctatcatttcttttacttattataaactcttgtatatactttttatttacagttgatgttataaatttatttaatctatcttttatctttccttctgtaatttctatatttcgtcttatcttttttaattctttactagcattagaatcaactttattagattttatacagtaatttatctcatcttctatacttttacattctgttatatttaaagcataagaacttaatgtaggtgaataaaattctttttctaacataaaagctttcatcttcctacaacctcttaaaaaatcttcaatatttacaagttcaacaggttctattatcattcctttttcaattttatctattgtagaacctgcattaaacaatccttcaagtggtatgtgattactattttcaattatctttctagcttctttattttctgctaatttccttcttactactccaatattcccactaggagttaatttatctattaaattttttcctagcgaacttacacaatgtatttttattaagtctttaacttcatttagttgcaatctttcaaatgtattactattcattattttttctcctttatttataagtcatcgtcttttaaatcaccctatcatttactttgataatagttattttgcgaacaacttaataaataaggagttattatatatcaaactccttatttattaagaagtttaactccggactcattaatgttagtattttttttcataaaacacttctccttttctattcttatttaaacacttataccagtgcttctaatattattccataaattatatatttatgtcaataaaaataatgttattaatgtttttgtacagtgaaaatttttatagtgaaaataagcttatactttcatttatattttggaattacttatattgtcatcaattcatgtatgtgtagtttccaatacaatctaactttgtaatcattatatatcaaagaatttagctctataaattatcgtctctataaaataaaaaaatagctaataataataaaacacttttaaatgttccataaaattagctatttataatataattttaatcttttttaactttaaaaattatcctttataagtaatcaatggcttcatagttgccactacttgaataagttcatattctatcaaactttcaataatctgctctatattcttatatgcctctggagcttcttgaaataataaatttacatcattacatataatctgacttttaaatttagtttgttttatagtatctttactatacttacttttaaggcgcgatttacaaactgaacgagaccattttctacctgctccatgtgatagagaatataaagatatctctgtattttcagtaggcataactatatatgatagactgcctcttgaacctggtataatcacagctcctctttcacttgaaacagcaccttttctatgtataaatttatcttcccttttctctataaagttatgatttatagagaatattgtttcaacatcttcagatgtacctattgactgcataatttttttactgatagcttcacgattacgctctgcccacattaaagcattatcatgttttttaatataatctattgctttctcactttcaacttcaagtccatctttatcataaaatttttttaaaatatcttctccataatttcttgacccacagtgaactaacatcataatatcatcagatgaaaattttaattgttcaaattgttctttattataaatttcacttatacattgaatttctacaaaatgatttccactccctatagttcctaaatttaaaattggacattcttctttatatgtgttttttatttctatatcggacaaatctttaatcttactaagtgacttaatccatttgtcttttttaaatttcttttttagaaccccagttttaaataaagtcattccgcatcctatatcatttccaattatatgtggataaataatatttttagtctcaactgctaaacctacaggtattttacctgtatgtaagtcaggtaatcctactactcttaaaattccatttaactttgaaatatcttctagttgtttccttgctatatcttcaatccaacatttattacttgctattatttttatattgctcataatttgctcctttttaatattctcctgcctttaaaaagtagcaaaaagctgtgacctttagccacagcttttttattctaaactgtaaaagcaggtggctatttgttaaaatactcctagacgtttaatacctcattattttttgttaacataataaccacttcctttcataatttaagactacactaaaatttctatgtatatcatttatagacattgattttaaaatacttaatatacaatttttatattatggaactaataataatcattgaaatcatgactatagctagaccggcaacaacaagttttttatgtaatttttttctcattttacttttatattcttttttaacttgtataactttgtcttgtttctgttcttcttctttctcatcttcaacttctatatatgctttttcatacattactttacttaaatcaataataatatcattggctctagtatacttattatttcttccaagaagcctttttataacatttataagttctgtatttccattaattgcttttatactattccaatctaatcccttatcaatagattgtagcattttttcttctgaatttgattctccaaaaggcaattttttaaatatagattcaaatagaataagacctgttgcaaaaaaatcactttctttatcagtataatttatacatagttgatgtgggcataaatatctcctgtttccatagcttcttgtattaaccccattatttgcttttgtaattccaaaatcacaaatttttatattgtattctgtatctactattatactactcgattttaaactaccatgatatgaatgattcctatgtatcatttctaaagcttttaaaacttgtatcattatgtttacaattgcttctaaatgaagataattacctagaattaattcatctagtccgataccattaaagtcttcacttacaacataatataatgttgtttcttctgtacagtgaatcccaacatctattatttttagtatataaggagagtttatctcatctaaagcagtactttcatcaattaaatttgaaacaaaatcttcacaaatataattattgtgctttataacttttattaacacatttctcctgtaaaaaacatctctagctttatagattttgttaatttctaaaacgtcatcagaatttactacctcatatctattgcctataaaattcaaccatgtcacctcctcatacattttatataactaaatctatttacaattataccaatatataggaatattttctatatattaatgattgtaatattaaaacaagaactaatagtgttaatttttacaaaaaaggctgtctcaaaatagagatacgcttcttttgtattgttgaaatgatgaaaatatatttgatttcacataaaaagagtgtctcataaactaaaaagttcattttgagacactcccttttatattacaaatatttctctaaaaaattatctatttttttaattctttataagaactatttgatatatgttctttttttatgacctttccacttgaatctttaaatattcgatatgtagaatatttattctgaccagtttgttttacctctatagatatatttggtttgtcaccagaattaccatagattactgatgatacacttcctccacctgcataatttttaatatatacaggatgcttatatggatttttaaactttaagtttaatcctccatcgctcacagtagcatctcttcctttaggcacataagtagatgcagatgaatgatttgtaacttgagttatctccatacccgaaagaagagccgcattataaactgttgaagatgtttgacaaacacctcctcctgctgattgttctagcttaccataaactataacaggtgcatctttgtaaccatttgctttattactaggtcctgtaagtttattgtatgaaaattcttcacctggcattaataatacatcactagtttttcttgctgataatcctacattatatgacctaccctctacagcttgtgaataagtagttgaatattgacctataacagaatttacagtttttacttgttcagttgttatatctggtttttgaagatttactttaagttctaaagttttatgctctttattttttatcatattatatatagactctttatttgctgccaaatcaaattctctacctacaacagagtctgtataacttagtccaccacttccaacactaatagaagcatttttcatcttaacatttatactatctgctattgaagacactttggaactaagttttgcctcatcatattcagcttttatcttcatatttgccttattcactcttatatcaatatatttttttaagttttgaaaataggaccctttttttgtactttcataagcatcttttacaacatcttctgtatcatattttaaatcaatatcttttggtgatattgtatattttttcccatcataagtaagatttaagtcttctggagtatacttatctgttatagcttttaatgcctctgctttagtcatatcagatacatttactccttctatatatacatttttagcgattttcccattgtacagaaatttactgttaaaaaaataagtaaatccacccattattagaactaaagctgccaatacaattaaaacacttcgttttttttctttacctaatcttgaaactcttgttgttcttctgcccataacttcacctcattttgacactagcttaaatttgcataatagagttcccatttcaaaactaccttagattatatttgaatagcttttgttaaacaaggaatttaatcaaatgtaactttattgtaaatttatgtcttataattagttttatttttgatattttttattatatttcttttactatttcttaacaaaaaattgtttattttataacaactaatttcatttatattgaaatttaaatgtaacctattacaggataatggtctgacaggtaaattttttctactgtgtatccttttaattcagtatttttattaacaaaaatgtaatctattctagagtttgatttttcaaatgttggtaagtaagacttgtttagtgaaatagccatatcattaaacatacttaaaaagacatttttctcattaaaatcaccacataaaataactatccccactaatctgttcctatagtctattatttcgtctaattgttttgctctctcctgcctatcaagtcccaagtgagtatttattacatttataattcttccatatgcatctatagttatacaaagagctccccgttgttcttttttgctagttaagaaaaaatgattactgtttaacattttagatgttgtaaatgtacaaataccatatatcatatttactttttttacatttgtagcaaagacaccatccatatttaaaacagcttttaaagctaaaaattgaggatataatacttcttgcaaacaaattacatcacaatccaattgttttaaatataaccccattttagttagagttaatctattatttgaatccatacctttatgaatattgtaggttactattttcataataatatcacctcttatgcaatataatacttactaaaatttaaacttatttacttttcacttaagaccattatttatcttataaaattgagtacttataaactttatcacaaaaaaacctaacttaagtatttatattctacataagttaggttttataaactattataatatttattatttcattcatttctaatgatgattctccttttttatctttttcaatttgccttcactaacaacaaataaaaatcccatcttcttgtatatttcatccaattcaattaaagttacttcaccattttttaaatttgttaatgttatatcttgtattcttcttgatggaattatcataagttatcaacactcctttaaattctttttaatctttatatttaaatatatttatgcattctgatatatattcataaattattaaaataaattcaaaaaacacccgttctgcaaacattcgttctgtatatttattatacatcatacagacgttcgattcaatataaaaattaaatatatctcgtttttagtaaattttacaatattatacactaaatatgtcaaaacatcttcttgaaatagattatcttgtcaaacaaaaaaaaccatttcagtaaaagcttctgcttaaattgaaatgacttttcttatttaaattattaattttataccatatttttattaagctaacatatgtaatatttgagttaccacaagagcacaataagtccctataatatttcctagaagccccataagtacacctactggtattaatacaggattgtgaaccccagcaatcattggagctgtagttactcctcctatattagctatacttcctacttcacaagtaaataaatcaagtttaaatagtttagcaagccctataaatgaaatagcatgtacaaggactactaccaatccaaacattatgtaaacaggtgcttctgacaatccaaagaaatttgctttactacctgtagctgcaaggagtaaatacataaacacatttcctaccagtgtactccctttaagctttgatatttttgtcatacccaataatattgatactgtagatgcaacaagtactacccacatagtttcattaagtatacctgaagttggaagtatcttggatacaatttgtgcaaaagacgcaactccaaacccaacagaaagtaaaatcataagttctacaaacgtaggtgccgtattatctttattttctttttcaagttttgatgtaacctcatctataaaacttgtatcgcactttgtccatttgttaaatttaggtccaaatttcacagacattagacaaacagacatccatactgtatatcctatagaacccataagtattgcataactaagtccttcttctgcaactcctagagcattagctgctgcaatcatatttgatgagccacctatccatgaaccagatgctgccccaagaattttccatgaatctgcacccattgaatttttaaaaattatgaatgctataacaaatccaagcataaatgtaaatgtagcacagaaaaatgataataacattttaggccccatctttaatatttttcttaaatcacattgaattaacaagaacactaacattaatggaaggaagttcactgttattatgttttgatacgttccaacatcttcattctgtgcaaataaaccaaatgatccaagtatagctgaacctaagtatattaaaagcattggattaataacatcaaataccttccatttcaatttatcaaccataaaaaaaattacacctacgaatacaaccaagaaactacaatatacaaatccagtctcaatcacattatacacaccctttcttttcctaattaatttgatttttatgatttctaagtaaagactttttcagataatagacaattaaaataaatacttttatctatatcatgctaattaaatacatatatacctaactattgacatatattaataaagatttgcacattaattactttagaaatgaataatctgaatttaaaatctttttcaacaattattttattactaaaatttttatttgtaaagataattaaactaaatattttattatttatttattttgttttgtatttatttttattaattattaaataaaactatttttactttaaatctatataatataaatcaaatttattttatatactttttttttaaatatgtttagattctattcttttaattttagttttcagaacatttgtatttatgttataatttgtataaatatatttatttaggaggaaacaatatgaatttaaatttaactaatactataaatttaatgaaaaaatatttggacattccaagcccagctggatatactgaaaatgcagttttagaaatcaaaaaagattttgaaaatttaggtcttgacactattcttacaaaaaaaggtgcacttatagctactcttcctggtgaagatgattcaaatcaaataacaatatctgcacatatggatacacttggagctatagtaaaagaaatatcatctgatggtactcttaaataccataaagttggtggtggatgttgggcagctatagagggagaaaactgcactgttataactagaaaaggtaaaaaaatcagaggaagtgttgtatttaagtatgcttctactcatatatatggtcaaacaaaagctgccactgaaagaaatgaagaaacaatgattattagacttgatgaaaaagtatttacaaagcaagatgtattagatttaggaataagtgttggggattttgtatgcctagaccatagatttgaggctacagaatctggttttataaaatctagatatatagataataaatcagctgtagcaatggttcttgaaatatgtagatattttaaagaaaacaatttaacgcctaagcatactactaacttttatataagtaattatgaagaaattggacatggtgtttctaaatgtttacctgaaaaaacaaaagaatttgtagcaatagatatagcacctactggaccaagtcaaacatctagtgaacatggtgtaactatagttgcaaaagataatttatcattatatgattttaatttaagaaacaagcttgtcgatgttgcagaagacaataatttagactacgctgtcgatgtatttactttctatggttcagatgcttcagaagctattcgttggggagaagatgttcaaatagcatgtgttggtcctggaacaaacaatagtcaccattatgaaagaacacatatagaagctattgaaaatacactaaaattacttataaattatatgcttaaagaataattaattatatattttaccaaagtcaattcttaacaaataattaactttaatttttatttttatacaaaaattggtttttctatagacttaatttcaatttactactattatataagtaacttcaattttctttagttaatttttattataatttatataaattgtataaaaattttcttcagttacttgttgttaaattaaatttttacaagctaaccctaccagaaaagagttatctaatctgtaaggaaatagtttaatatagcacattatacttgtgtaattaataacttttcttttgtagaaacttttctttacaaagaaaagttttttgattttggatttgtttaagacatattttctgagttaggaggatatttatgaaaaaggttgcagttataagtgctattttggaagagccaaaagaatgtcaatttaaattcaatgaggttgtatcaggttttaaaggtattattaaaggaagaatgggcattccttgcgaagaagaaggtgtctcaatcgtatgtatagcagttgttggcgaaatggatactattaatagtttgactggtaaattgggcaacatacctcatgtatctgtaaaaactagtatatcaaaaaaagaagtttaaggtggtgagtacaaatgagtctaaattctactccacaatcggtaagagtacatataggtctctttggtaaaagaaatgcaggtaaatctagcataataaatgctataacaaatcaaagtgctgcaatagtctcagatattgctggaactactacagacccagtatttagaccaatggaaatccttcctataggaccttgtgttcttatagatactgctggtcttgatgatgttggtgaacttggtgaacttagaataggtaaatcactagatgttttagaaaagacagatatagctttactagtagtggattgccaaattggtatatcacaagaagatttgtcactaattgaaaagtttaatgataagaatatccctcatattctaattctcaacaaaattgatactattaagaatcaatcagaaattttaaacttaactaaaaataaagttaaatgtccagttgtttctgtctcatcaacagataaaattggaattgaaaatttaaaaaatgaaataataaaagttttgcctaaggatagcactgagttcaaattggtatcagatttaattgaaccaaatgatttagttgttttagttgttccaatagataaagcagctccaaaaggtagacttatacttcctcaacagcaagttataagagatattttggataatggtgcaatttctatagttacaaaagaagatagtttaaaagaaactctatctaatttaggcaaaaaaccaaaacttgttattactgactctcaagtatttccacaagtaaataaagatacaccaaaagatattcctcttacatctttttctatattgtttgctagacaaaagggagaccttaaagaattgattaatggagcttatgctttagaaaatttaaaagatggtgataaaatcttgatggctgaaggatgtacccatcatagacaaactgatgatattggaacagtaaaaattcctaatatgattagaaagaaaactggcaaaaatattacttttgaatttagttctggagtatccttcactgaagatataaataaatatgcccttgtagttcactgtggagcttgtatgatgaatagagctggaatgttatctagaatagaaaaggcaaaatctttcaatgtacctattgtaaactatggtatcttaatagcatatgtaaaaggtattttggaaagatcacttgaacttttcaattattaaaaatttaactatacttaataattacatatttgaatatgactaaaaataagattaaatactttatagataaactttacagcattaattcattaagttttgatgaactactatatttaatagaaaatatcgacaatgaggaatataacttcgaacaaaatttaagaaactatctttataaacaagctagcgacatgagaaataaacattatggaaatagagtctacttgagaggacttatagagcttacaaactattgtaaaaataattgctactattgtggaatacaatcttctaataaaaatatcataagatacagactttcacctgatgaaatacttgaatgttgtgatataggttataaaataggatacagaacattcgttttgcaaggtggtgaagatgcatattttactgatgataaaatatgtgaaattgtttcaagtataaaaaataaatatgaggattgtgccataactctgtcactaggagaaaagagttatgattcgtataaaaaatactttttatgtggtgcagatagatatcttttaagacatgaaactgctacagacagtcattataaaaaattacatccgccaaacattgagcttagaactagaaaagaatgcctaaaaaaccttaaagaaattggttatcaggtaggtgctggatttatggttgaatcaccatttcagaacaacaaagaccttgttcgtgatttattatacctaaaagagttaaatcctcatatggttggaataggaccttttattccacaccatgatacaatttttaaggattataaacatggagatttagagaagacattacttatgctttcaattacaagacttctacttccaaaagttttattacccgctacaacagccttggcatctataaaccctagtggtagaaatgcaggtcttttagctggttgcaatgtaattatgccaaacctttctcctcaagaatttagaaaacaatattctctttacgataacaaagcctttactggtcaagaagcttgtgaatatcaccaaagtttagaagaaaacatcaagtcattaggacttgaagttgactattctcgcggtgataatattgaatggaggcgtttgtaaatgttcataaaccatgaacttattaattctttattagaagatgcaaaaaattcaacttctgatgatattgaaaaggtacttgataaggctgatagaagggaaaaacttagttataaagatatagctacacttcttgaagtagaagataaaaaacaactagatagattatttagtatagctgggcaaataaaaaatgaaatatatggtaatagagtggttttatttgcccctctttatgtatcaaactactgtgtaaatgaatgtgtttattgcggttttagtaaatgcaacaaatttaaaagaaaaaaacttaccatggaagagataaaggaagaggttaaaatattagaaaaaatgggtcataaaagacttgctctagaagctggtgaagaccctaaaaattgtgatataaattacatcttagattgcttagatgcaatttattcaacatataatgaaaacggaaatataagaagggtaaacgttaacatagcagctacaagtgtagatgagtataaattactaaaagaaaaaggaataggaacttatatattattccaagaaacttatcacaaaccaacatttataaaaatgcatggtcaatctataaaaaatgactattattaccatttaacagcttttgatagagctatggaagctggtgttgatgatgttggtgcaggagttttatttggtttatctgaccctaaatttgaagttctaggacttatgatgcacaacgaacacttagaggaaaaatttggtgtaggtttccatactatatctttccctagattgaaaaaagctgaaggtatgagcttagaagattttcctcacttagtttctgacgatatgttcaaaaaaatagtagctataactagattggctgttccttttactggaatcataatgtccactagagaaactgctgaaatgagaaatgagttactaaaatatggtgtatcacaaattagtgcaggttctctaacaggtgttggaggatataaagcatatgaagatggtgacaatacagaacaattcgaagttggagaccatagaagccctgttgaggtgcttaaagaactgattactgatggatatatacctagttattgtacagcttgttatcgtaaaggtagaactggcgatagattcatgagcttagctaaaagtcgacaaatccataatgtatgtacgccaaatgctcttactacattaaatgaatttttaatcgattatggagatgaagaacttaaaattatgggtaaaaaacttatcgcagaagaaataggtaagatagaaagagaagatataagaaacatagtatctaacaatatgactgccttagagcgtggagaaagagatttatacctataaaattttattacttatatattatttattgtatattccataggttagtagtaatattatctaaagggaaagtttaagggagggagattaacattgaaagataacaacaataccaataaaactattcaatttggagaaaaaaaggctagcctggaaaacaatattcaaaaaaataaaaatatcaaacttgataatacacacaaagtcattccttaccctaaaaatagaaaaaaggatgataaaaagaaaggtaacaagaaaaagaatacaaatacatctaaagtaaataaaaataattatggccattcttttttcaataacaaatacaaatataaaagaaaaccatatgttattgctttatacacagtaattcttattcttttagctatcttaattataactaaattaacagatagtacgaataaaggtaattattctcgtaatactgtctctgatactcacaaaaacgacatccgaaatatagtctttaatgaatcaaacaattttcttatttgtgggtaacttaaaagagttatctcatttcagaaattactttctaaaattgagataactctttttttcatttaatatttattttaccaaccttgagttacttcatatacttcatcaccaattctaccatttaaataatcatctattgcagaatctatgatgctcattgctttatctacttgctccttagttattactagaggtggttgtactcttaaagtagattgtcctaagaatatcattattaatccagtttgtatacatctataacatatcttagctgtagcatctggatgtttttcattagaaccttttcctttaactatatcaactcctatagataaccctattcctcttatttctccaattatatcgtatttttcttttagtttttcaaatcctgctttaatataatctcccatttctatactcttttgaagtaagttttctttttcaattatctctatagattttaaagcagcgacacacactgttgtatttccagctaaagtaaataaatgtgctggtgcatcaagactttgcattatttctgttcttccaacaactgctcctaaaggtaatccacctccaacagattttccaagaactataaggtctgcttcaacaccaaaattttctataccaaaccacttacctgttcttcccataccttgttgtatttcatcacttacaagtaatattccattttctttacatattttacttaaaccttgtacccactctactggaggcactattattcctgcatctcctgcaattggctctataaatattgcagctacctcttctgctggtagatagtgtgcaaaagcatattctatctcatctaaacattctttagctgttctatttttatcaggataatggaagtgataaacttctggtaacaatggacccatttttcttctcatatttgtacttaaagcagatatagatatagctccataagtacttccatgataagattcacacatagatattatctttgttcttccagtataccctcttgctaattttatagcagcatctatacaagcagaaccagttgcactgtatagtacttttttatcattatctccaggggctatttccacaagcttctcagctaattttacaggaggatcactatggaaatatgcaagtgtatattgtgttatatcatccatttgttctttaactgcttgtgagatttccttattaccatgacctacatttgcagagcctgcacttgctaaaaaatctacatattcattaccttcataatcatatagcattgcaccatcacctgatttaaatgctactggataataaggtatcttttgagttttagcaacatattttttttcttctgtacttatcatttgactagttatctcgctcattggcaaatcatcccctctttaaataaatttatgttctaaaattattgcgatttataaagatattctcatataaaattctttatatacttaatgttagtatttttgacacaaattgtcaatatatgtttttataattttcaaaatatttgttatttagaaacaatatattttatttttatcaaataaacattatttttcaaaaaataaaggactctattctatttttatagagtcctctgaaaataatcttataaataccattattctattcgtcttcattaaattgtataattaccttttctcattaataatttttttaaaatgttctagttgctcttgttgttttttatgttttatatgtggaaatgcttttataactcttttttgtaaaataatattagactctatacggtccaacttactatttattttgtttattttttctctaacttctaatccgtcgttatttattgttttaaataaagcttgtatttctcctctatcaaatttatccaatttcacatttatatcattaaggtctgtaattatatcgtctagtaagtttaactttatatctaattttttaagtgttataatagtaacaatcaaatcaagtatagtccaaagtgttgtaattatagccattgaaattaatattctatatggaattatacttacaaaatattttataaatggatgtataaatcttattattaaaacagacattacaccaaagtatattgcattttttaaacatactctaccctttatattgaattttctgtcagaataatcccaccatttagcatgaaataaggtttctaaaataaatcctgtaaaatattctagtatcgtagttaaaatcattcctaatagaaatactattactacattattaaatcttcctaatagtgatatcacaattactgctccaaaaccataaacagggcatattggaccatttaaaaaacctctgttgattattcttttgcttgctatagaacatcctatactttctactgtccatcctaaaaatgaatatataaaaaagtacaagatatattttattatctccataatttatctctactccttcactaatgttcttattttatgcacaacgtaaaaataattatagaaatagttttttcgttttttatatttgttattcttttattcttgtttaatattttattcatacaatccaattaataatttactagccataataccatgtttatcctttggctgattttctttatcaatccaaacattaatagtatcatatctccttaataaatctaaattcttcacatcaaattcctcatatttaactatatccatttttgattctttggtaattatataagatactaattttgtattttcatttaaataaattcttatatttccatcagaatcaattaaattctctggtctctttactttgttattagaacctgctttaatagttattattccttttttaaagctctcaaatgtcccaactatatctactgtatctttatttatatctttaattatttccctattttcttcaattaatatttttgatatttttctatcaggtctaaatttaaaagttagtaagttatgataatttttagaaataactcctaatcctaaaactcctaaaactaaactagtagctattatagccttaaatcttttaatatcattaggaaataatttattcatgtttatgtaaatattaattccaattattccacctaatgaatttaaaataacatcatctatatcactacttccaagagcaaaaatatattgtgttaattcaaatgctaggctaacaagtataattactataattatagtttttttatttagatttttacatactataggtaaaaaaattcccataggaataaatatacctatattttctataatatttacagtagctttcataaagtcaagattactatctactataaattgatatattgtataaaatggaattaaatttacattcctaaacgttcccttgaaaatagcgtaaattggtacatctctaaataaaattattcttataatcattaaaatatataccaaaaatattatgtatataattgacagtaacaatttttctgactttttactttctatcactgataagtctcctttcgctattaatattttaagtatatcaataaatatttaagacgattttaaaatttccttaaaatttccttaattttcaaacaaaaaatcaaaaaagcctacacttaaatgtgtagactttaataaattttcatacaaatacattttattgaataacgaacaatcttaatgtagaaaaaactataactacagttaaaagaagtctagcatataaaaaatttttttctttcaacataactcctgcaactccaaatataaaaaatagagaagcaataaattttccaataagattattattaggataataactaaaaagcataaaacaaagtacaaatgtaagtactcctattgcattaaacacaattttattagatgctatttttcctttattgaaaaagaaacagaatattgacactaaatctaaaaataaaaatacataaaacattccttttaaaacgcccatttttataccccctaaaaattctaattataatatccagtttatttcatataatcgtcaatataatcaatactttataacatcagtataacagtattacaaatttatattacgaatgtattacttcgtattcatacatattataatcacactcatacatatttaaagactcatatgttgcttttgcatttatgttttctttttctacatataatctcattccaactatattttcatctttatcacatatattttttatataattaaataaataattaaagataccttttcttctatattccttatctacatatacactctgaatccaaaggaaatttccatttctccaatcactccactcatatgtatacataatctgtgcaacaactttatcaaatactgtatatacatgatattttccttttctctcatctaataacaatgcttttacacctttagttaaaacatccatatcaagttcttttccttcagtttctttagccaaattataattaaattttgctattgtatccaaatcatccatacgtgcttctcttatctctattagttcttcattttcatataactctatgtagtccttttgttgctccatacttattcctccatatctattttatctactaaggttttttatataatatatttatagagttttttctatcttcataaatgcataatcaagtgtagcctctaaatttccattattcttacctcctccttgagctaatactttacttccaccacccttgccatctataagacttattgcatcctttaataaaactcccatattaatatcttttaaatttttagaacatgcaaaaactaaatttattttatcattaaatttaacagctaataatgcaatactattttcatattctgcaattttatttgctatcttatttacatatttcaaatcttcatcatcataaatttttttaatgaccgaaatattgccaaccttatttgctttttcaatcatttctttgacctgatatgtagatactacttcttcaagccttctttttttaattaaagcctcttccactttactatttagatttacaataccatttatagcatcttcctcactacagcttaaatatctacatattttagtcaaatatatatccctcttcaatacttcatccactgcccttttacctgctagaaactctattcttgtacttgacttatgtttttcccatttctttatttttatcattctcaattcaccagttgattttggatgcactccacaacatgcattcgtatctaaatcacctatttttattactcttatctcttcatcagtatttggcaaatcacgtcttaaccaaatcttttttagttcttttttcgttggaagtaatgtctctacttgtatattttggcgaataatttcattggcaaacaactctatctctctaattttgttctcttctaaattaccttctatatctactgtactatactcatttcctaaatgaaaacctgtcgtatttgcattaaaagttttaaaaaaacatccagataatacatgttgtccaaaatgttgatgcattccatcttctcttctatcccaatcaatactacactttaccttatgtatctttataggttttttatctaatacatggtatatattttttccatcttcatacacatttattacatcatcattctctatttttcccaggtctccaaactgacctcctccaccaggaaaaaaagctgtcttatctaataaaacatgatacttattttctacttcttttatttcaattatttctgctgtaaaatctcttatatactgatttgtataatataacttttccattataattctatctccattttcttaattatagactactttactttttaaatacaaatttcaagctaagcttaatttaattgtattaaaatagaactcatcctattatttactaacatcttctactatattttaacatatagatattagtgttaacaaatttataattttatattatttcaatattttataacaagtatgcttacttattttcttatataataaaatgtatattaaaacatattaaattgcaaaataagcttcaatctcttttactaatttcatccattattaatgattttgaaatatacattgcttctataatattcttaaaacgtgtatgatgagatgtctcctcagaaaatttcttctgtactttttcacaattaataatccttgaagatgctactctcagtacttccatcaactcttcttttgtatgataattcataacacatttactcctttgttttttaatttagagaaacagtatacctcaatttaatatcattatcaactgatatcattattatttatatatatcttttaacacttaaatattctaactatcagtgacattacatattttaataattattaatatacatataatactttaacattcattaatagagagtatattaacattgcttttttaaaaattttagtataaaatcatattaaataaattttctgaaataataaaatattaaaatatccaaaaacagcttttgataacatctataattttcaatgtatcgttattttagggggagtgatttaaaatggcaataaagccaagaaaaatatctattgtaggttcagggcatgttggttctcattgtggatttagtttaataactcaaggagtttgtgatgaactctttatgattgatatagatgaatctaaatcaaaagctcaagctttagatttagctgatgcagtttcatatctaccacataaagtacatatagaaaaaggaactttttctgactgtaaagattctgacatagtagtgataagtgttgcagactcttcagaagggcctttacgtagacaaaacacaactagattagatttactaagaccaactattggaatgataaaatctatagtaaaacccatagttgattctggctttgatggtatatttgtagtcatatctaatcctgttgatgtagttacaaattatatttgggaaaaatctggctttcctaaaaataaagtcattggaactggaacagctttagattcaacaaaacttagaaggattttatctgaagaaactggaatcgctcaacaatcaattcaagcttattctatgggtgaacatggagattctcaaatggttccttggtctcatgtttcaattggtggtaaaccaatcttggacatgataaaagacaacccaaatacttatagcaatttagacttaccatcaatagttgaaaaaaataaaaaaacagggataagtataataaatggtaaagattgtacagaatttggtataggtactgctttagtagaaattgtaaaagctatactacacaatgagaaaaaagttcttccagtttctacattactagaaggtcaatataacgaaagaaatgtatttgcaggtgttccatgtgttataggaaaagatggtattgaagaaattattgaaatcaatatgactgaatatgagcaaaacgaatttaataaatcttgctctgttttaagagaatgtattgcactttcaaaaacactttagattcaatattctttcttacactaaaagcaggtaaatgacttattgaaaagacttttaactaagttaatgtttaaatcatttatacctgcttttaattttaatactaaaatataaacctattttttaccatcaaattttataactttactttttttatttacctcttgagataacaatccttttttcaatcccatcaataattctaagtcttctggataaagatttattccaaattcctctaaacttgatactatactatttacactcattattttattttctatcaataattcaactgctctttttaaatacgttgggcttgaacctttcattttgtctagtggttcttctatcaaccagccttttttatccatttcattcataagataattgtattttttgtaatttatcttttctagattatatgctctaaaaatcatagcagatataggtacaatccattttttctttagttctacataataatctaaatcttctggatgagtcaaatcttttaaaaaactctcttttggcaataaaaatgcacaggcatactcatcttctgaaaattgcttacttggtattcttaattcacttgatattatatatccaagctcacatgccaaagtataatttctaattgatgctgactttttgtcattacccagagatattagatatttagattctttactaattctctgtttttgagtaaagatagttgccccttttctatctacattcatacctgatattataatccctttagattctaacaaacttaccatatttactattggagtactatttaaatcccaaaactctctagtcttatatgcaagagattctatatcacttatattaatatctgacattacttttctatttggcaagttttcttttggaaacttaatataattctccataaatgaatatattttatgtattataattattttttctctataagaaatctcttctactctaggtagtttagattgagggttaaaatggctatcctctacaacgatatttatattttcatttttataaaaatactcttttggaaaatttaatatattagataattttaatgtattttctatatttggtacatacttattttcctcaaaagcttttaaatcttttttatttattttagtttctttagacaactgttctatcgtctttgctctaaaaattctagctgattttaatctctttccattaaagtcttttaaattcatttgttttctctctttcaaaattaaattcttaatctattggtataaataagattacaattaataatttatcatattattgacaaaaaaacaaaaggtgaaaatatttttttatattttcaccttttagataagtttataataaatattcctaattactcaaaaagttttaaatattctccatatcctaaaacttccatattttctcttggtataaatttaagagaagcagaatttatacaatatcttaaacctccaagttcttttggaccatcatcaaatacatgacctaaatgagaatttcctttagcacttcttacttcaattctgtacataccttgtgagaaatcacttctctcaatgatagatttatctataactggctttgaaaaacttggccacccacatccagaatcaaatttatcttttgaagaaaataacacttctccacttacaatatcaacataaattccctctttgttattatcataatattcattttcaaaaggtacttctgtcatatcattttgagtgacttcaaattgtataggagttaaagtcttttttaactcttccctatttatattgtttccatcccaatgactttttacaaaattatatcttccagaccctttataatacatattgtagtttaatggtctttttttataataatcctgatgattttcttctgcttcgtagaatttagttgctggaattatatcagtcactattttactatcaaatattttactattttccagatgttctcttgactctaaagctatatttttttgttcttcatcatgataaaatatagcagtcttatattgagttcccctatcaccaaattgtccaccatcatctgtaggattaatctgtttccagaagatatttagaagttcatcataacttattatatcatcatcatatgttatttgaattgcttctaaatgaccagtagttcctgaacatacctcttgatatgtagggttttcaacatgaccacctgtatatccagaaactactttaataactccatcatacttatcgaaaggttttaccatacaccaaaaacatccacctgcaaaagtagcaagttttatcattttcatcactccttaaataaattatactttatttattccctaagaagtaacttaataatctgcattttattatttttacctactcaatgaaatcatgtgcaaaaatacaattgcaaattgaatctaatttctataaaagctctttttctttatccatccaaaagcatcttttatatcacaattttctcctaaagacattagatattctaatgcatcacaatcatccatagctacatctttttccatcttaggatttaatctatagtaattatctccaagaagtttttgagaaaataactgactcatttgagaatttccttctaaggtaatagatataattggtaaatcgggttctttattaattatccagtcaatagctccccattcagtagtatctgcctttatactattatatacatatccagtccctattgaaaaaagtcttgtattcttaagtttaaatccactgtcaatggcatgaattatacacgctaaacttgggtcagttgctattattcctccatcaacatgacgattatatgttggaaaaaatactggagcagcactacttgccattgctacatctacaactttgctagtctttgtaaaagaatttggcatattgttataaaacactggtttccatgcattttcctcatttcctatataaaaacttggtatcattactaatttatttaaatcttttaattctagttcctctggaaatatacttaataaaacttcttttaagtttttgttttcatactttggtctgagtatttctgcataacttttattaaaaatatacttagaattttcaattgagtaaagttcttttatctctttagggcttacaccatacgcaagtcctagtgcaattagactccctgtagatgtccctccaaacatatttatattgtttaatagatttggatactcttttactatcctctcaagtatggatatactcaatgccccttttaatccaccaccatcaaatgccaatatattaaaattagaacttttcatatacatatacccccacataaaacaccttatattttaatcaaaataatttcactatagtatatatattttatgcaagttacatattacaatgttcctcttttaatatttaagttacattcaaacctttagtacttaaaataaaatatataagatattatatatctaagtattataaatttaatacaaaaattcttaaaagaatatactgaaagcaggtttatttttcaattattacaaaaaataaataaagggtcgtctcaaaattgattttttaatcaaattttaagtttaaccccttatcttaattgtgacatacttaaaaatattttaactataaatatctttaagtatagatatatttatttatcctaaaatcttcttcatatcttcttcaggagtagatataggtgtcaatgcaaatttatcaaccaatatatctaatacattcttagataagaatgctggcaaagaaggccctatatagatatttttgatacctaaatgaagtagtgtaagaagtatacaaacagctttctgctcataccatgacagtaccatgctaagaggcaaatcatttactccacattcaaaagcatttgccaatgaaactgccactttaattgcactataagcatcattacattgtcccatatccattaaacgaggtaagccacctatatccccaaggtctaaatcattaaatctatattttccacatgcaagtgtcaatataacagtatctttaggagcttgttttacaaattcagtgtaataatttcttccaagttttgcaccatcacaacctccaaccaataaaaagtgtcttatagctccactctttacagcatctactactttatcttgtacagatgaaactgtacctcttgcaaaaccagtagttaatgtatctcctccattaataccagtcatatgaacatcttctctatatcctccaagttcaagagctttttctattacactagaaaaatctttatcttcatcaatatgaaccatacctggataagcaactacttctgtagtaaatactctatctctataactatctttaacaggcattaaacagtttgttgtaaataatattggagcaggaatattatcaaattctttttgttggttttgccatgctgtaccaaaattaccttttagatgtttatattcttttagttttggatatgcatgtgctggtaataactcaccatgagtatatatatttatacccttatctttcgtttgttctaataatttgtgtaaatcataaaggtcatgtcctgtaactacaataaatggccctttctcgattttcatagatacctgagtcggttctggtgttccataagtttcagtatttgctctatcaagcaattccatacattttaagtttatttctccagttttcataactagacctaaaagttcgtcaatagacaagtctcctccaactgctattaatccttcatagaaaaattcatttacgtctttgtctgtataaccaagtaccattgcatgatatgcataggcagccatgcctcttaatccaaataagattaatgattttaatgaacgtatatcctcattatcattccataaatccttcatatcatagttatcatttctattacaagttgttgaacaatctgaacatctaggtacaagtttacttttttctacctcagttttttcaatttgtctttttatagcttcatcatcaaaacttacattcgttatagtagtgaatagcccctctatcataattttatctgtttcacttgttggtctattcttatttccaatagttgctcttgaaagaccaatcaacactcctgtaagctcgtcttgcaagttagctgtacccccctttttaccacaaacaccatttatagtacaacctttacctcctgctgtttgttcacattgaaaacaaaacattttttccattttttattcctccctttttatttattaaaatttattatatttttctatgattcacttaattaaatttctccatctacaatttttccatctacagatatagtaactatttgccatggtatcatttttccactattttgtagagctgtcttaacagcatttactataccaccacagcaaggaacttccatacgtgttactactatatttttaatatcattttcttttaaaatctctgtcagtttttcagcatagtcaacttcatcaagtttagggcatccgattaatgtaaccttatttttcataaatttattatgaaaatttccatatgcatacgctgtacagtctgctgctattaaaagacttgcattctttaaatatgatgcattagttggtactaattttatttgtactggccattgattaagttgagaaccttttatctctactatatcattgcttatagatgtactatttgaaacctctctatttattgacttagactgagaacctggacatccacatgctaaagttttcttttgtgctttctttgcttccatatttgcttttactgcagcttcatcatattctgctgcttctctatactcaaatgaaatcgcatttgttggacaagttggcagacaatctcccagcccatcacaatagtcatctcttaaaagttttgcttttccatttaccattcctatagcttcttcatgacaagcttcaacacatagtccacaaccattacactttccctcatcaattttaattatttttctcatcatttatatcacctcataaaatttttttaatttaaagtattgatttcttatatatttatttttaatacctatatttctttatttcaaatttcttgtagtaggatttttatatccccttgcttttataaacttagtatagtacaatgaaaacaaattatcggttgcatatgcaacaaggaagtgattatttgaaaaaatttttagaaaagcatatagacctacttaaaaaaattcctctatttgaaggaattaaaagtgatgagcttgaagaaatgttggaatgtttaggtgttgtagataagacttacccaaaagatagtataatattctctgttggaagtgaagttacttctattggaattatgcttaaaggaagtgctcatataataaaggaagatatcgaagggaataggaatattgtagctgaactcttgcctggagatttatttggagaggtattcgcatgtactagactacataaaagtaatgttacagtaaccacaacatcttcttgcgaagttttatttataaagtttaaaagtgtaactggtatttgttcatctgcatgtgtatttcataataggcttgttgaaaatatgctacaattaatagctgaaaaaaacattttacttcacaataaaatagaattactttctcgtaaaacaactcgcgagaaattgcttatgtatttttcaaaacagatagaacaaacaggtagccaccagtttacaattcccttttcaagaaatgaaatggctgattttttatgtgttgacagaagttctatgtcaagagagcttggcaagatgcgagatgaaggcttgttatcttttaataaaaataaatttgaaatcttttactttcaaaaataaactagatatttaaacatatttatttcaatatatactatattagttaattcaaattataaatatcatatttgaatcttaaatttatatttttacttaaaaagttaatagatatctaatttattaaaattaagatacctattaactttattaattaagtgtacaattagcttattttctttgtagtaattgctgttttatctataagccaatcttttccttctactaatcttgaaactaacattgatgatactgtatttccagttgtatttaatatagtattaggaatatcagttatagtagttataactgttaacaatggaattgcctccactggaaaaccgaagatgctaaccacgagcatctcaccaataagtcagccacctgctacaggagccataaatactccaacaacaaatacagttataaataattgacctatcgttgctggatttgccattccactgcctaaaatacctgataaaaatgccacttttattattactgctaaaactgacccatctttatgtatatttattccaagaggtataactgtttctgatatatcatcaggaactcctatatttttactagcttctaaatttgatggtatacatgctgaacttgaagaagtagctagtgccgttgctattggttttatagcatttctccagaattgtctaaacccttgttttcctgcagataaaaaagcatacagactgtaaaataataagaaatacatggctgctgttagtgaataaattacaaacacccttacatatccttgaattattttgcttccaagttccccaattattgtagctgtataacagcctagccctataggagcataaagcatgactatacttactacttttaatattgcttccgttccttctgataaaaactttcttattgtatttcccctatctcccatcatagctattgctgttccaactaaaactgcaaatataactaattgtagtaaattgctactggaaaataaatctccaaaatttttaactgtaatacttgatactacttggtctaataacgttccttttgattctaaagtttctgcatcttgagccaccattaaactttttacacttgatacatctaatcctttagacggattaaataataatgcagatgtaatacctaaaaatgcaattacaagtgttgttcccataaatactatagctgtactcttcattatttttccaaaacgttccatattttttatactagcaacacctgaagaaacactaagaaaaactaatggtactactatcattaatagagcatttatgaataaatctccaaatggttttagtattgaagcttttggaccaagtactaatcctactatcacccctattatagtacatgctaaaagtataattgatgacttataattttttaaaaagtccctcatttatattttcctttctaatgttttatattataaattaccctaaatcctaaaaaaattaaagtaaattatctaatgcgcattaataatttttgtaattttccccaacagctactttagcaaatactggaatatatgtcaatttctatagtttttttgtatctttaatattttattaatagttcatatctatatataaatattaataaaattctgcttttaaaactttttttctagattaattttaataaaacaaacaatataaaaaaatatatataatattgcttaattattttcaaatttaataatttgtactttaatataaagttttagtatactcattgtaattcctatgctttatcattccatcaagttaattttgtaaacatatatgatattttgtcaaatattattttttcatgtacttgatatttttgatatacttttaaaaagaattttcaaatagttacatttctaattttaaattaaataataaatctaataataaaaagatacttccattaaatttattatctaacttataaatttaatgggagtatcttacatatcttctaatacttaatttatacacttttaactaaatacttcttctttcctaacgatatttaaaaattttgcagttctttcatttttaggattattaaatatttcatcaggagttccttcttcagctattacaccattatccataaatataattttatcagcaacttcttttgcaaaatttatttcgtgagttacaataagcattgttattccttctttcgcaagcgattttataacgcttaaaacttctccaacaagttctgggtcaagtgcagatgttggctcatcaaataatattacatttggatttactgccatcgctcttgctatacctatcctttgttgctgccccccagacaattttgatggataaaaatctttcctatccaacatacctactttatctattaattttaaagatatttctctagcttctttattactctttttatgtactactatcaatgcctccattacattttctaatgctgttttatttttaaataagttataattttgaaataccatagatgtatgttttcttaaattggctatatctttttttgttgctttttctacatctacttttacatcaccaatcattatctttccttttgtaggctcaactaaataatttaaacatctaagtaacgtagatttacctgttccagatggtccaagtatagctactacttcactttgatttatctctaaatttatacctttaagaacttctgtccctttaaaacttttatgtaaattttctacttttatcattgttatccacctttttaaataaatataataaataatatgttctacatcaaaattaatatactagcattaaatttaaaaataggctaaatatatttttatgaatgtactctatagttgacataaataatctactgcaagttgtgagaataatgaagatgctatactaagacatttttcatctatattaaacttgttactatgcaatctgtagtttatatttttttctttatttcctacacctatatacataaataaaccaggtttttctttcatataaatagcaaaatcctcacctgtcattgcaggaaaatcaattatttcaacattttcaactccaagtattttgcaagcactttctcttcctagctctatcatgtttttgtcatttataacagcatctcctcctgtactcttttcaaatttgcaatctgctccgtatgctctacatacatttcttactatattttctagaattttacttacttcaattacttgttccttgcttatcgctctaatagtcccttgaagtgtgcatacatctggtattatatttttagaaacaccagaattaaaagaacaaacagacactactacaggtacaactgggtcaatttttcttgaaactatctgttgaatggatgaatatactgcatttccaactgcaattgggtctatacaattatgaggctctgctccatgcccgcccttgccaattattgttatttcaaaagtattagtcgctgccatagcacaatttctagcgattccaatttttcctgattcaatagttggccaacaatgaccagttgctaatgcatccacaccttcaagtacattttctttaattacaatatcagaaccacctttttcttcgccaggttgaaatagtaattttacatttccattcaattcttcttttatgtcatttaaaatcattgctgttcctaacaaccatgaaacatgggcatcatgcccacaagcatgcatattatcatttattgatttaaattctaaatcattttcctctttgattggaagggcatccatatccgctctaagcaatatagttttcccaccattattttttccttttatagtagctaatactcctgtaccagcaacatctatgtattctattttaagtttatttaactcttcttttataagtttggatgttttaaattctttaaatgctaactctggattactgtgtatctgtcgtcttatttttatgattttttctctattttttagtgcaatggattttattttagtttcaatcatttgcaagacctccataactcattttaatttataaagactaatctaaatacattgtaatacacagataactatagataaatttagtatacttatctatagttatcacagttttatattttaattttaaagtatttatttttgtatatcagcacttacatccattccaaaccatttttcagatatttttttcactgttccatctgaaagcatttcttctattgctttatttacatcttcttttatagttttagatttttcatcatttttcttaaagaagtatgctatattagtaactgataatttttcatctaatactcttaccttcatattagcttttttagcgtctcctacaacagtaagttctgcatcaatccatgcgctaactcttcctaaatctaaatcttgaagaccattagttccatcaccataaaccttttcttcaaacaaattatctttattaacactagctgcaacctgttgcccttgagaaccttctgaaactgctacaacttttccttttaaatcttcaagtttattaatttcgttgtttccatcttttacagctatacatacagaatcagaaccataaggtatagaagcatcgtatttttctaatctttctttagacattccaaagaaattggctgccacatcaactttaccagaatctaacatcccaaatatagaactaaaacctgttggttccatttttatcttatatccacttcttttaccaatctctttccacatatcaacttcaaaacccttatgctcaccattatcaacataagaatatgggtcagctgaattagatgaagctacagttataactttttcatcctttacttcctctttttttgaacaaccagcaactacaaatgttaacgataaaactgccactaaacattttataatatttctttttaccatatctcttctcctcacaccattttttatataaaaatacttttatgtattttcttaataacttaataattgcttattttcttttctaattttttttgcccccaccctaaaggagttattatgcaccagtaaattaccataactgctccatacacttcaaagaacttaaaactcaacgctccttgtgatttggcagcacccattatatcatttactccaacaacaaaagctacagaagaccctttaattaaatctataaaattattgaataatgatggcagtgcaactcttacggcctgtggtatcactatccttttcattgtttgtaaatttgttaatcccattacatatgctgcttctatctgacctttatcaattgaaagtatagatgcccttatcgtttcggacatataagctcccatatttaaactaagtactatagatgttgcaaatactgggtccatatttttaacaaaatcgttcatatacgctagtccaaaatataaaaagaataactgtggcataagaggcgtacctctaaagatagatacatatactttacatatttgattcaatactttcactttgtaataagatgataatgctactattgtacctataattaatgaaaatactaatgaacttattgccaaaattacagttacattgaacgatttcattattattggaaataattctaaaaaatatttcatattaaaaatcataaaataagtccccctagcttaatgttgttttttataaaactttgtcgaatattaaattacaatagaattttatttattttttcaatagaaaaactattttttaacttgattatacagtccattttgatactatattttctcaataatttagattactaagtttatttttctaaaattaaaaatttatttacaagtaataatatatctacatcatcccatttttaaatattgaaatctaatatgcctttcctattcttttttcaactttgctttgtatattactcaatattatagatactgcccagtaaattaatatcgttatcatatatatctcaaaatatttaaaacttgaagcagcctctacttgagctactcccattaaatcttgtattcctatagttagacctaaagaagaacctttaattatgtccagtgtacagcttacaataggaggtactgcagatgtagctgcttgaggtagaattattttaaccattgactgatatttacttaacccaaaagcataacatgcttcctgttgtcctttatcaacactctcaatagatgctcgtataatttcagtcatatatgcagatgaatttacacctaaacaaattactattgctaaataaggtgaacaatctttcataaaagaaaatatcattggaaatccaaagtaaaagaaaaatatttgaattaaaagtggtgttcctctaaagaatgaaacatacactcttgttatgtattgcaaaacttttgattttgtctgtgtgaaaaaggcaagtattacacctaataatattgataaaaaaaatgcaacaatagatattagtattgttattcccaatgctttaatcaaaaatggaaatatacttagacaaaattcaaaattaaaattactcattaataggctccttagtaatgtcttttcctagccaggcttcagatattttagtcaaagtcccatctttatgcatctcttcaattacttcgttaatttcttttgtccatttttcacctttttcatttttttgaatcgcaaaagaacaggctccgaattgaattggaggttctaccattttaagatttaatttttgttcttttatagctattaaagcctcaacatcctgcgcaactactgcatctaatcttcccatttctagatcttgataattccctttaagagttgcacttgaataatttactatttttatttcatcatttgggtacttttcttttagtatttcatttgctactgctccagtacccacacctactttcttgccaactaaatcatctattgattttatactagtatcatcttctctaacaataatgtttgttccactataattataagcatctgaaaaagcatattttttctctctttcaggtgttgcagtaagttgagcagatacaacatctgctttatcagcttctaataatccaaataatccactaaaatcagttaatacccattcaactttacaattagttcgtttagcaaattcatcccaaaaatctacttcaaatcctttaagtttatctttatctttaaaagcaaaagggtaatatgttcctgatgttgcaactcttatagttttttgttcttctttatttttattatttcctgatgaacatcctgtaattaaaagtgctaataccaaggcaagcataataattaatttaagttttttcataatttattctctcctttttaatcttattttaattttttatataatacattttcaaaggttgaatcacttgtaccattataattgtttaatggctctgccataacataactcccaaatattgatactgtagtaaaagattgcctcttattttataccttactaaatttgcttttataacactataaatcaattttctagttattatattatacttcgactttgaacaacataagtttaatatgttttacagtctttgtccaatagcaaaaaactattactaaaaatcacattatagtatccaactatatccataaaaaagctatattgagtttttattataacaaactcaatatagctttttgtaaaaatatcttataccaagtataagtcactctctatatttaatttatttattaaattttaatgctcctgtaggacataccattacacaaggtgaatccataccacacttatatctctcaatacaaccattacacttatttgccttaccatcatttccataaattaaggctccatattcacaagctttttcacaaagtttacaccctatacagttttgattgtctaatacaacgaatccttcttcttttttaaaacaatttttaggacatgcacctaaacattttggctcattacaatggatacatgctaatgaaaaatattctatattttcaccttcctctattgtaaatacatgtctaaaaagttcaccattgtctatattattatcattttggtctatacatgcaagcaaacatgctccacatgctgtacataattctttattaaatttaaataaacttttcattatatctctccatttatctattcattttttcaatcttacacttgcaacttctatacgcagggaatccactataagggtcaaaattatcatcaataatactatttatatcagattctctatatccatgatacatatgtatattcttatataagactctatcagtaacattgacttttacatccaaacttcctatcttagtagttatttttatataatctccactgataacacccaattcttttgcatccaagctggaaatatcacaactagcttcattttttaatattcttgaaagtttgatgtcatgaagtcttgaatgtagtgcatttgaaattcttgctcctgatgtcaataaatgagtatattcattatctatattatcattaaatcctctatatgttggtagtgcatccagtccaaaatctttatatttttcaataattgtagattttaattcaaacctagaagtgctagtatcatacccctctcttgtatatgagcctactatatatggcttaaaatctttacattttaatggtaaatcactttctttaagtttatctacatctacacacgtctttttaaacatatgtcttatacttgcttcataacctgcttttaataaatcatcatctatattcataacatttgctaaatctgaaagtatttctacatctgattttgaatcgtataatttatcaataacttttttggtatatgtaatataccctcctgggtaactcttacattcttctctctcaaatgatgtacacgcaggtaaaagtatatctgcatattttgatgtatctgtcataaataaatctatattcacaaaaaaatctacactatgcaacgctttaaaaagtctccctgaattaggaaacattctagcatttatcccatgacaaaacaaagctcttatttcatatggtgtcttttcttctatttgcctaggtaaatccatagcttgaaattgagttaccatttcattccatagaggaaatctttctccaccaattctttcatttatatttttaggtagaacttcttttacaaactctttttctagtgtttggaatccacctatcttaccagcaaagtaatcttgttttggtatgtttccacctattctatcataattacctgttatagcagataaagacatcattgctctatagttttgaaatccattttgatgatgaactattggagctgcactttcatttatacaaaatggaccttgtgacaacatctcaacagcttttactatattatctttagaaactcctgtaattctacttacagtatctaaatcaaataattttacatattctttatattcattaaatccatgtacatgcttttctatgtattctctatctattaaatccttttgtataaatagattcgccattccaagagctaaagctccatcagttccaggtttaattcttaaatgtaaatctgctagtttttgagttgtcggtgttattctagggtctacaattataaattttagacctttttcttttaattttattagattcacactatttaaaaatttagagtagtatggattaaatccccaccctaaataagtttttgcattctccatatcttgcattgtaaagtttcttccagtagcaacatttccagccatctgtgctgatgttgaacatgaactagattctgtaccataattaggtgaaccaaatgaagatgcaaacctttgcaaaaaaggtctataccactttccataacccgtaaaaaaagctacatgctttgctccatactcagattttactctatttaatttttctgctatttctctataagcttcatcccatgatattggtttaaattttccttcacctctttttccaattctttttagaggtgtttttattctatcttctctatatatatattctctattgcaaagacctttggtacataacaaccctttattcattggatgttcttttgtaccttctatttttattactttaccatctttaacatatgcatcaattccacaatgtactcctggagaacaaatatcacataaagtcctctttatttctatacctgtttccttacagggtattttagctttaagttgtctataactatccatattaacattttcctttcccaataataaatacaaattattatacttattatacattctttttattcaaatatcatactttatattttatatagtgcaatttctaagaatatttttaataataagattttatatttattaataatctatttatataattatttttcattcatagtttataagataattcaataaaaatctaatagtaaattgttatttacacatatattgtaatagataaaagctattcatatctgccttaattttagtcttaaatttagagtgtaaattgaatgcatttagattataatatatacagtgaggtaaggtgaataatatgaaaatagatatgatatataaactaataagaagaaatacagaaccatcaagatggtcaagaggtgtaaaatattatactaatcaattagttgattatatagacatagatattgatgacctacaaaataacctgttgacatttcgtggtggagtcaattctgaagataattatagcttttattttaattcaataactatagatataaagcactttaagataattgaaaatgattgtagttgcgctgactgtcaatcaaagggcaaaagtatttttatatgtaagcatatagttgctattgtgataaaaagcttaaaacaaataaaaaataaaagagatgttcctcctattctaatagatatattaggtgcagataaggataagctttctaatacaaattctaaaacaagcttagatttaagcaagcaattactttctttgttagacaatactaaaagagaaagggttaatttagatgtattgataaatgtggattcaaataaagcaattgctgaatttaaaataggaattgataaaatgtacattttaaaaaacattactgaatttgcatattcaaaacttaatggatatgaattagattttgggaagaaatttacttacaaccccaacattcattattttgctgatgaagatgagaagttagtagatattatagaagaatatgggacaaatctttcatacaacttttcttcatcacattcaaaaaaatttatggagataaatgcaagctctttaaaacaatttttaaatgctattaagtacaaggattttacccttattttttctaaagaggaatatcatccaaagatattaaatgatactctacctgtaaggtttgattttaaaaatatagaagataaaatagtcttatattctaaagattcactacctgttccacttactaaaaaaaatgatgtacttttatatgatggcaatatctatttattatcacataaaaaagctcatgattattcaaaaatatatcaaatattatcaaagactaaagagttaaaatttgataaagaggattctaaggatgttttaggattgctagttcctagattaaaatctatatctcaagaagttcatttagatgataacataaaaaataatataacaaaagattttaaatctgagttctactttgatatgattgatggcaacatatgttgtgatgtaaagtatatatatgatgatgaggataaaaaatttgtgctccccaacatacaaaaggaaactactattgaaaataaacttacttcttcacaatttacaaaggaaaataatcattatgtgtttaaaggaactgactatgacctatttacatttttagatttacaattagaatctctaaaggaatttggagatatatattattctgagaagtttaaattgaaaaaaatatataacgcttcatcaattcaagcttcaatcaatcagactaaccagaattacctagaatttaattttaatatatctgatataaatccaaaagagtacaaggatattttgaaagcttttcaagaaaaacgtactttttataaacttaaagatggaaactttatagatttatcagaaagagaaacaaaagatttttttgaattagttgaaaatctagatataatggataaatcaaaaaataataaaatttataaaaataaagctctatatataaatgatgtaatacgtagtaaaaatttaaagtttatagatggtaaaaaagaactagacagtatatgtgaaaaatttagaaattttgatagcataaatttagaaattcccgcaaatttaaatgcaaaccttcgtgattatcaaataaatggcctcaattggtttaaagttttagattattataaatttggtggtatattagctgatgaaatgggtcttggtaaaacaatacagactattgcatttttattatcattatctaataaaaaaagtcttattgttacaccgacatcactcatttataattggaaaaatgaatttgaaaagtttgctccagatataaaagttttattgatacatgggaataaaagagatagagaaaaatgttttatggaattagaaaattttgatgtaatacttacaacatatggtactcttagaaatgatttagaaaaatatagtgaaataaagtttgattattgtatattagatgaagctcaaaatataaaaaatccagtagctttagtaactgagtctgtaaaaagtataaatgcagaaaataaatttgcactcactggtacacctatggaaaataatctactagaattatggtctatatttgattttataatgcctggctatctatatagtaaagcaaagtttcaggaattgtttataaataaagaggataatgttaaaaacctgaaaaaattaataaaaccttttattcttagaagaagtaaaaaacaagttatgaaagaacttccagataagattgaaaaaaacttttttgttgaattgaataaagagcagaaaaagatatatagtgtatattcaaaagatatacaagataaaatgaaagataaaaatctaaagaaagataaaatagttatattttcttatttaactaaactaagacaactttgtttagacccaagtatagtagtaaaagattacaataaaaaaagttcaaaaattgaaacatgtttagaaatacttagggatagtataaacgaaaaccacaaaatattattgttttcacaatttacttctgtgcttaagaacataagtaaggaacttgataagtataaaattaaataccattatatagatggtaaaactaatgccaaagaaagacttgaacttgtagatgagttcaataatagtatggataaaaaagtttttttaatatctttaaaagcaggcggaactggtttaaatcttacatctgctgacatggtaattcactttgacccatggtggaatccatcagtagaaaatcaagctagtgatagagctcatagatttggtcaaaaaaattcagtacaagttataaaattgattgctaaagggactatagaagaaaaaataataaaattacaagaaagtaaaaaagagcttataaatcaatttataaatggagaactttctaatgaaggtgtattaaaaagtctatctgatgaagagataatagacttatttaactaaattatttaatcctacagcttaactatataaatttattctaacatttatatagttaagctacaatatctgaataaataaaatttcatattgttatttaatcccaactttacaatctaatgatatctctttctatacatattgcatatacaaatgtaataacttgactattagaatattttgttttaacaatcctatttcatcataataatgaagtatatgtacactcacttttgtaagttttgcaatccattttacagttttcattattgtaaattttggttaaattattcctctaaaaatttctttgctacatttgaaaaatctaatccattcgataaaattgcaggatgaccacctttatcaaacaaatacattttaccatttttaatcttttcaagaagtaatgaaaaagtattttcaaaaaaatcactagatattagagatacaaactcatcttctctacttcctgttaaaagcacctctggttgcatagtttctagaggcttatgaaaaaattttcctatagttttataatgttcaaaaatagcttctgtatcattatctacaactttttcccagttttctccttgattataaatataaaaagcttttgcaccatcatcttgctttgatgcctcacgctctattttaacattttgtacaaatgactctaaaggaacttctccttcaaaactatctgcaattaccttattcactaaatcaggtctctcaagtgcaacatttaatgcaacaagagctcctccactactaccaattatgtttacttttttatagttcattgcttctaaaaaacatatcacttgcatagcctcatcaaaccataagtcagcagaaaatttatcgaccatttgagattttccatgacctacaaaatcaattaatattactttatattcatctttataaaaatcgattatatcattaaacattttggaagaggctgtatttccatgtaaaaaaagtaatggtgtaccatccccaatttcattatagtagcactgtttgtcgttatagttaaaatatgccatatattacctcctttaatatccctataggtatatatttattacttatatttaaaatgactattgtcataaacatttaaaaatagtatagcttagaatgtagataaagtcaacattcctttccttaacaacttctattgttttttgaaacttcatttcgataacagaataattcataaatattgatactcttacttaaatatatgatttcatcatcagagagagcagtaataactaaattatcgtatatctcttttcactttaaccatttttttctttataggtatctccttatatttttttaatatcaaatctcccttataatttaatatatctacatatgaacataaatcttgaacttcaattacacctatatcatcattagttataccttttatattactaaatgcaccaactatatctaaaactcttattttcttcttcttaccagcatttaaatataatttaacaacttcactttctatatttagttttatatctttacttttgtaagaatttttatcaactttttttctctttgatactttttttaggattccttttgaatattcttcaaacaaaattttgccatgtgtaattctacttttttctatatcttttaattcatttactttatatcctatatacgtttctatattctctatatatttttcatccttttcagttactatagtaattgcctttccactatttccttttctcccagttctacctattctatgtatatagttttctttatcttgtggcacatcataatttattactaaagaaatatcatcaatatgtattcctctggacgctacatcactactaactaatatattaaatttttggtttttaaaatccttaattacaaaaattcttctttcttgtgataaatctgcatgtaactctcttattaaaaaaccctctttactcatcttattatataatttagatactttctctttggtattacaaaatattatcacactctttggattttcgctgtatattaattcttttaaaaggatgtacttctctcttccatttgccttgattattttgtcatctatttgtcttgttttttgattagtatcgctctcattttcttctatatttataacactgtaatctagcatatatttttcacatatatattttatctcttcatctattgtagctgaaaaaagacttactattttctccttaggtaaatttaataatattttttccatttgttcaacaaaacctttattaaacattttatctgcctcatctattactaaatactttacattttccaacttaatagaacctttatttatatggtcaagtattctgcctggagtagctacaacaatatgaaccctttgtttcaattcagctatttggtcttttatagattgtttgccaaatatagcactacatctcaccttctttagtctccctatatctgatatctcatcttttacttgcaaggctaattctcttgttggaaccactataagagcttgaatattattgcaatctacatttatattctcgcataaaggtattgcaaaacttactgtctttccacttcctgtttttgacctaactactaagttttgaccttttaataattttggaataacttctctttgtactctagaaggtatattatatcctaaactcttcaatgacttaagtatcttttcatttaacttaaatttttcaaatgtatatttcatatattaccaccttattatatttatcttatctatatatttttctacattatattattataatacaaggttctactatttttatattatttattagactgaagataaaaatatatactctataaacctatagtttagtagcaaatcaattaaatttttatatttaaatacctccttaaatatactgataaatcaatatttaggaggtatctcttgtcaataatcaaactaatctatattttgaaagtttaaattatactaatacattgtatttttatttatatctaatattaaaaggtattaatcaatacctaaatcaccataatctcacatatttatatctttattcaatataccttctgtaatcaatcgtgctatataatcataacctgattcatttgctttgttacaatcattcacattatcacagaaaaaactttcaatctgtattgcaactggatttgtatttctcaatatatataaattttctctttttttagctcctctattttcaaataattctccaagtctattagatactcttttagcatattctaatccttcagtgccatagtaaagcacttctgtaccacattgtgttccatcagctttatttaaatgtagctctactaataaatcgtatttaccactgtttacttttggaactctatagaaaaattcttctctttctgacataaagtgcctttctggacaaattattacatctactgtattaccttgacttataagcatctcagctaacataggagctaattttttattataattgtattcatcaactataccatttacacctgtacttttaccaccttttagtatactatgacctactgttatgcatattttcatttacttttttcaccttcttttaagccaatttttatataatagtaatataattttaaagttattactaataataatatattaattgaagaaggtaaaagttctccgtgattatcatttttttaacatatttgtcttattttatcataagtctatattttttaaatattatactatacttattatttataattgtttaattaatcatttatatatattataaatatatcaatatctattttcctttaaccaaatgctattttaataagtttaagttttagctttaaaatacttaataatacaataaaagtgatgtatttacaaataattcttctggatttaattcatttattgatgtatgttcaatttttatatttatatttttcatatcttcataaataattccaactggagaacaaatgaaacaagaaaatccaaaagtttttgttattttttttaccttattatcaccaaaacttatttgctttttacaatcgtttatattttcattgttattttgtatatcatttttataatacttatcttttttaatatcattaaacttatttactgttttaaaattactcctatttttacaactatagtctatttcaacttctatacacccaaaaactatcgagttacataatttcaaattactacctttgtttataagatttttcataggtttaacatcaaatattttactatttacatttacttttaatatatctcttagatttttaggagcttttaaagtattacttatattcaattgtttgaatacaattttatttacattagtataaactctattactttctattgatattcttgttgggaatttatctagattacacttataataatagtatatattagcactattctttataatcctatgtgcagaatttggtaaaactacactcttaaaagatattatttttttacaacttgcatctattctccctatgtaaaaaccttgctgtgggtctaatccacgttttataatgccattaacttttacagtattatttataaactctatatatttagaaatataatctttgaaaaatatatttccagttttgtacctacttgtatttgtaacaataatagtgtaggtcaaaatctcaaatacagatgcacattttttatcaacatatttttctacttttataatacttccatttgcatcatttgaaaatacatcattaaaagtagttttcgttattctcattgcatccacctttctataatttaaagattactctatcttggaactattttcataacttataattgcagtaacactaataaataaattatcatctaaaatagatgaagtaatatcttgtataagatactttaaattaattttatctttattttctatctttctaggcatttgtataaatgtactaaagggtatttttaatttaaatgtattttttttactagaatttctatttcttttattgcctgcataatctaatgttacatcagtatctatatcgccaactaaaatcaacttctttcctgtcatttgttcatcttctgacgatatacattccatagtatcaacgagacttatgctatgaatattcatattataagtagatgtatctaatgagtttattacagtttttttagaagttaacttaaagtttttatatgtattaaattgagataaataaagagcattttctagcttttcacatctttcaaaattatatattaccttattattttcatacataatcacatcaatctccctatatctatatattaatactattcataaaaactatttcaaattaccatttttgattattcacgattcagttactacttacttttaggaaagaatataaataatagtgactatactaattatccagattaatatagtcactactttaatacaaactaaatgaatattatattattttttacttgaaatttaaacaatctttattttcattaaatctattattccggtttatatatgactttactatcagcatcatatattaccaaagaatttgcttttatgacttcatcattgtacttaatgtctttttgagaaaaattaactaatacctttaaatcttctccatattcagtcatttgaactagtctatcctcagaaataaatttaaagtctgtcatttcttttttaatagctttcttattaaacgctgaccatactttattgtttgagattatttcatctttatgtttttcccattcagttctatctatataatacataggtggtgtattatataatacttctttcatcattctacttccaacttcatccttaatcttcaaagttccccataaccactgatgggaagatatcacagaatcattataaactaatctaaataaaggtagagagtaaattgggtctataaatatttttttgtacctttcttttacaggtatctgctttgaaaatatttctggtactcctcctgttggagaatagtatttaccaacataatattcactgcctttattcttactcatatctttatctacccaagcaaatgctggtgtctcaataccatgtgcaaatgctatagtactacttgaaaaatcatttccaccttctgaacctatgaccatatttgcatggtctcttatatatgacattctttcaagtctagcatttaaatcttgtgtttgtgttgttatatgattttgagaataatcatcatagatttctcctgtagcatcacaatctataaaccaagaattaaattcatatccttcatccaatatactttgtactctctcttttacacttggtaaagacaatgtaggatttagttttcttccttctccttgaaatccagtttctttttcaccttttttattttctatggtagcattttcatatagagatttatctttaaatgatgctgtactccacttttcttcccctggtttgtgtatagagtggtatgaatcatatggccctacgagataacctaactcattagctcttttaaccatctctaaggatatataaccttcctccatatcatcaaatcctatccacgcatttttaataccagacttattaatatcattaattacatcagttgtattatattttgcccatgtagcaacatcattcacgctctcttccaattttgatttcaataatttcttattaaactctataagttctaccctacttaatttagatatacctttatctaatactttttttatttctctatctttgctttcaaaaactttttcattataaaaagtattcatctgcataacttcattaaatgcttgtactatttgatttttttgatatttatctatataatcttgagtttttatttgattaattacttttataaattcactattgccagacttcatacttaaaagctctttcatccaattagtcaaatcatctgataaattttcttttaatttattccattcaatatcatttattgtgatgatagacttatctccaaaataaatatgtggtgctccataaagtttttcaatatttttattttccttagatttttcttttaatgttttaaattctcctttatcaactatataatttttataagtttttgctacatctgtaatattcttattagtcaaatatattttaaacccatactccttatttttattgatacttggatattcatgtttaaatgtaaaattaatcttgtctttagaactaaattcaattacattgttaaattcattttcgataatataaatcacagaatactttgccttgtttactgcaaagaattgcattgaaaaagattctataacattataagttgactcatttagatactccttccaatacttatcattacttggtataaacttaccctcataaagtggtagtatataactttccccttcaactttgggccaattaaaactagtttctttttctaaattagatttaatatttacatctaaatagctgtcctctttttttatatttatgtctatattttcatcaggatacgtccacgatgcctctgtcttattctttttaaaatttgatactttcctttcttttgagggttcagatatcttttcttttgaaccaccagattcaactgatacctcaaatatttcaggtttcacctcaaaactaaaatccaaatttttaacactattgataggtgatgtattttttatcacctcaccactactacatccagtaatagtagttacaacaaccatacaacttataaatatcgagaatatttttttcataaaaaccacctcctcgataaatatatcactcctatgttacataaaagttacacttcactttgaatttcgctgtctattaattgaagattatactgttgaattaattctattagacgagctgcatatatactattgccattttcatccttcgcagtactataacctgccttttctaatgctttagcttgatatatatacgtttttgcatcaaatacaccattgtttttataccttttatttgtggctaaaaattttgcatggtcttttatagattcatttttatcatcatatattctaaatttatcatctataattgtatctaaatgttctttcgtttctaaagtcactgacttacctttccaataagcgtcagcctttataccaaatagattgttatattgttttgccaaagttgacttgccccagctagattctattatagcttgtgcaatagttatagatggaagtattttataatccttataattttgtattgcttctgttttaatttcagcaataaacttcatatattttgtatcagacttcaatctttctggttttataccataatccttaagattgtctatataattatcaaccaatcttttttgtctattactaaattctaactcatccaaaatatcacttaacttatttattttattatttttagaaaaattcttaacaaataaatctgatacttcttgtatctgtgaatccttaacgttttttaagttatttttatttaacacagcaacaatggaagctacatacttccagttaacttgtgcattatttttacttgctaaatcagcatattttatatacttactgacatttatatcatccttttttatctctctagatgaatattccttcactaatacacctattaaaattgatattatcagtattataacaatgaattttttattcttcataaatattgtcctcccttatactatctgctgaatataatataccttacttttgtgacatattctttacgaaattttgaagattttatgaagatttatgaaatatatttaattaaaggcactactattgttataatatatagttttctatcacacaaaatagttaaaatagataaataattaaataaacttattttaactatttatataataaaaatattattaaatctacttatcaatttttatatatttttctaatatatattttttcccatatacaataatttttattggtttaccttttaaattttctattttaattaaatcactacatacatctacattaataatattatctctataatttatattgaaagaataatttttccactcttttggcaacttagggtcaaaagatagagtttcattccatgttctcatgcctgcaaatccatgtacaatggaaagccatgaaccagacattgaagttatgtgcagtccatcatttgtatcattattgtaattatctaaatcaagcctagctgttcttgagtataattcataagccttttctaggttatctatttctgaggcaataatagaataaatactagaagataaagaagattcatggacagtatatttttcatagaagtcaaaatttctctttttttcttctttagtaaatctatttccaaaatagtaaattccctgtaatacatctgcttgttttataaaacacgacctaagaatcttatcccaagaccaattttgattaagaggaaaattttcttttggtaaatcctttacttctacaaattctttatctaaaaaattatcattttgaattattatttgtagttcctcatcatacggcagatacattttatttgatattattttccaaaactcaacttcttccctagtcacattatttctgtcaatacattcattacactctttctctaatcgtaagatattttctacagcataatctaaacaccatttagctatacaattagtataccaattattattgatattgttttcatactcgtttggacctgttactccatgtatcatatacaaatctttttttgtagacaaatgaactctacttgcccaaaatctagctatttctattattacatctattcctttttcttttatatatttatagtcacctgtataatttgtatagttatatattgcatatactatacttccatttcggtggatttcctcaaatgttatctcccattcattatgacattctactccatcaaatgttaccattggatataaagcacctttaagccctagtttttttgcattatcctttgcctgttctaactgattgtacctatattctaaaagatttctagttacctccttatctgctacacctagatatactggaacacaaaatgcttctgtatcccaataagtagctcctccatacttttcaccagtaaatccttttggacctatatttaatcgcgaatcttctccataatatgttgaaaatagttggaataaattatatcttataccttgttggctacttttatctccatttatttttacatctgcactttcccatcttttattccataactttgtatgttcatttaatatatcatcataacttttagatagttctatatttaaaatgtcttcacattttcttaatagctcactttccttataatctctagttgaagttatagatacatatttttctatacttgcaaccttattttttaaaacatccattgttatcgaattttcacagtaattataatcactctcatgagatacagcttctacatcaccatttgtcttaatatacatcattgaacccacagtgaatactggtgtattaaatgcattctcctttgttcgagaaagaatactacctttatattctaaagaacttgaagaaattccattccaaaacttttcctcatagtttgaatcttcattttttatatttgaatctaaatatggtacaaattttattttagtattagaatttaatgattttatactatatttaattactgcaagttccttaacagatatacttaaaaacctagtaaccctaacttcaaattttttatcatttatatttacaataaacctacgatttaaaataccatttttcatatctaattctctataaaaatcttctactttacattttgctaaatctaattctacatcatctatgaaaattcttacacctatatagttgactgaattaggaattttaccaaagtattctggatacccatttttccaccaaccaacacgagttttatctggaaaccatactccagctatataagaccccttgtgtgtatctccactataattttcctcatagtttcctctcatacccatatatccattgcctatactcattatggactctgctaatctattttctttgatttcaatcttatcttgtataatcttccactcatctacattactaaataaacatttcatataattctcctaactatatactcattatacttttcttgtatatattcaaactttaattgatttgttgaatctacaactaaatttgctttttttaagttttcataatttccaacaccaacagaaaacatattagctgagtttatagcgtctatacctgcacttgcatcctctatccctatacaattttgtggatttacattaagccctttcgctgacataagaaatatctctggatgtggtttattgtttttacattttcctgcatcagctataaaatcaaatttgtcacttatacccaaatgatttaatacatttattgcattcttacttgcagaagatagacctatctttatattattagattttacatcaattaacaagctttctatgcctggcaaaatatcatttgaagttatctcatctatcaatgatacatagtaattatttttttcttcagccattctcactttttcttcttctgaaaatgaatatttcttatttccaaattctaatatcctgtccaatgactccattctacttatgccttttaaagattcattaaattttgtgtctatatctatcccaactttatgggctagttttctccaagccatatagtgataatatgcagtatctgtaattacaccatctaaatcaaatataaatgcttcaatcattcttatttcctctttctacaagaaatttttagactaataatcaatttattttctatcttgtatttaagatattatttataaaattatctactctaactcagtctttaatttaaaatctactttcaattcactcacttgtaaaccatatttttttatgttttataaagacttgtttaaactgtataataatttaacatgaaatctaaaataaatactttttgtattattttaaaataatgaacttgtatttctctaacattagttcttcttttaaatcaactatttcttcttcatataaatcttttacttttttatttgctaaataatctggtaacgtcaaaattatatttttagatgaattatttattattatagaaatagattcttttttcaatataatcgttccattttccttatctgctaacacccattcatttgatatagacctaagttctttattttctttacgaagtctaataatcttcttcataaaatcaaatatatccttattccatttttcttcattccattccatacattttctttgaccttcagatattgaacttaattctccttccattccgatttcatcaccatagtatatacaaggacatcctgtttgtacaaacataaacatatatgcaagtttaaatctatcaatatttccattagcataagtcaatattcttgtagtatcgtgacttccaagtaaattaaaaataacttcactaacttgtattggataacttaccattacatcatttatcatatacttaaattcttcggcgtttatctcatctgtacaaaagaattttttcatggcttctgacatcaagtaattcataactgaatcaaattggtcacccattagccatggtaaactaccatgccaaatttctcccaatatataaatgtctggttttacttttttgacttcttctctaaactttctccaaaaaacatggtctacttcatttgaaacatctaatctccacgcatctatatcaaattcctgtatccagtacttgcctacatccaataaatattttattacttctgaattttctgtattaagtttaggcatatatttttcacacccaaaggtttcataaggtatatttttttcatctatctgttctattggagtatcaattttactcatatcttttatataaaaccagtttttatatcgagaattttccttattttgaactacatcttgccactgtttagaataatatcctatatgattaaaaacagcatccaacattatttttatatttctcttatgcgcttcttctattagtttttttaaagtctctttatctcctaatgtagggtctacctccatataatctaccgtatcatatctatgattggtttttccaattgtaatagggcaaaagtaaattccgtttattcccaaatcactcaaataatctaagtgttctatcacaccttgtaaatctccacctgtaaaattatctctggttggaatagctccccatttatctactccttctgggtttatagacgggtcaccatttgcaaatctatctggaaatatctgataccaaacagtatctttcacccaatttggcactttaggtatatctatataatttaaatatggatatccaaaaaaattacctatttcacataattccttttcatcattttcatttcccaactctattattcttttttctgtaaataaaagtttttcttcttgaccttctattataaaaccatatcgtgagcgtttatttaaaggcttacacttagctatccaatagtcaaataattcagtttctacttctttactcattactatatttgttccaccagaccaaccaactccagatgcatttaaatttcctcctcctgcacctcctttatcccacacatattggtctcctattcgtaaaattactcttttcgcttcattttttttagttctaagtcttatatgtagtgtttctctatcataaccataggcataattgctcattggtatatgtaatatagcttcttttgttaaactattttgaattgttcctttgatttgattacttaaagttatattttctttatttttattaaacattttaaaatttccctcctttataataatttatataatctaaagataggttaatatattttactattatatcacaataaaaatatataatagtaaaatatatcaacaataaactattcaatttaaaataaactatactatttaaatttaattctatttagttattttagcaaaataaaaacctctagtatttttctagaggatacaatattataactattaactttttaactatccattaatttacttcaaaacatactctaagctatattgttagatttaactttttttatatttacaaaataagtttctctttctttaaataaagatacatatttaaagtcaagatacttaagcatatcataggccacatcaaaatctttacatatatcttctaccctatgagaatcagaacctacagtaactataaatcctccaagttctttatatctttttagaatatcttcatttggatgtatagcatttaatccatatctataaccagaagtatttagctctataccactcccattattgattattgactttaagacctcatcaataacatctttaaagtcattgtatataactctattatctgaatatattccatacctagatatataatccaaatgaccatatatattgtaatctccaaattcacgattagtttcaagtatgctattaaaatatttataatacgcatcttctttgctaagacctttaaaatacgcctttgatggaacaggtacattgtcaattgtatgagttgagcacaatacaaaatcaaaaggattagaatttattatttcttctatttcattttttagatgttttctgtaacctacttcaacacctagtaataactctatatcctttttatatttttctttaaacttattaaatactggaacatagtcattataatttatgcaaaatcctctatcttcatcatgttctaaatggtctgtaaaagtcaaatatctaacaccaatacttatagctttttttattgtatcttccatggaatcctttccatcacttgaaaaattagtatgaatatgattatctattaaattcatattatccctccctttattttatctatcttaattatacaacaagtttattgtatacatttgttaaaagaaaattataatggttaaattttatttacatacttttatttttacaaaaaagagaagcacctatttctgattttagaaaatcattaaggatacttctcttaatgttacttttatatacttcaatttaatttttaaaagtcttaattttgtaatagagtttagctgttatatgtccaatcatataaaaagctgtataaagtaaaacatatatatatgcagaatcatttaaaaatatatacattaatactatataagttactaaagacacaataagagataaaatccaattagtcttatttaatacacaaattatcccttgtattaaaaaagaaattggaaaaatcaaaaccattcccacaacaaaaatacttttagattgaatatctggaatattaaatatatctgtagcaaaagttaaaaacattagcaccattatgattgtaggaaatatgatactaaaaatattactctttttcataataatcaatccttatttattggatatttgataatcttcaattattttgttgcctcaatttctcccatcattcttactaaatcttgtccatattgacctccagcccaattattagataaactttcaactgttttagccttaccaaataaagatttttcatgtctagggtctactggatttgaaagtgggtaaccatcttgtcctgcatataagcataaatgttgaatttgagctaatattccttcttcccaagtatcaaatcttgaatgggcattcttatcagtatcagaaccacctacagaagttttaagtccacaaggattcttaaatgatgcatctaatactccaccaaaattacaaaaaccagtttcttttgcagattgagctactgccaaaacaggattaacaccttcctgaacagcagtatcatataatattggtattaactctataaataaatcattagcttttttagattttgcccattttaagcacgcttctaaactagctgttggctgacctaatatgcttgtctcatttttcataggtgactcaccttttgtagacgaatcgccattattttgtgcagcagaaacacacttattatacacactgtcacttattgaacctaatctagtaatcttatctgctcctgctaatatagacttatcactactttctgacaccaatacaattggattttccttagcaattgtagaacctgtaagtgcatttactaaatcatatccatcactcaaataaaattctgatgcatctggataaaactcttttataactttcttatttgtatcatatctatctgaaccaccaagtcttttagcattagttttattaactaaactagtgctcattgatatactcccacctactgcatatgtttttacattgcttgttgaaaaaggcacactctttccatctgtaagtactataggagctatatctcttactgatacgggtgcagcacttattgtatctgcttctcctttatatgcattagttaatatcacttcatcaacttttttgataccatttacctctttagcaacactataactagtctttattctgtcatctccacccaatctagttacctgtgcccctgtgttttttagttcagtttctactgacttacttattgataattctttacctattatgtatatctttttaacattttttaatctttgttttgtttcatttggtatcttatttttttgtgcaagcaaaattggagcatcaacagcacctgcaagaccacttgctgaaagaccatctgctatagaattatccatatttaccataattgctgtatcataactctttttatctgctattaatccagccgtctcatatatattgttacctttaattgtatctgatgttaatgcatctacattaggtacatttattagaaatatagctaatgttaaacctaatgctaaaactcttctaattgttctcatattcttcccccttgatatatcaagtttaattcaaaaatgactataacatagtattacatctacgctatagtcatttattataatttaataattatatatttgttattatatcataaattacaaaaagtttccataatattgtatagattaaaggaaaaatttacattttagttacaatttactagatttttgttctaatgtacctatatttagtaacaatttgtaataaaaatcgatatctatattacatatttaattcactgttttacaaaatgaaattttattgtatacaataaatagattatatgtttacataatctatattatttttaagtaaatcttttatcgatattattaagaatatatattacatcaagtttattacgtgcaaaccactatcaacttaaatacctaaggtaacacttgaagtagtagattcttggtaacaataattattgctatcattatctttttttaattaagtatttactatttatatatcaatctacttttcacttttaatttaattctaacatttttttatatgttttatgatatataatgtgatatattctaattaatgatattttcaagtaaaaaaatgttactctattataaggtgatagtatacttgaaaataaataaaacacttaactttatttaaggagatttatgatgagtaacaaacaaggttctaacatcaaagatgtaaaaattaaaaataagttaataatattgaaattactttctacaaatacacctatgtccagagttgatttagctaagtctacaggacttactaaaatgactttatcaaatctagttactgaacttattaatgaaaatatgattagggaaatagagtcatcaactttaaatgcacattcatcaggtcgtaaacctattttattagatatttctaatatatcgccttgtatttgtggaatcctaataagaagaaatatatgtaaggtaattatttcagatttaaaaggtaatattgtaaaacaactttctgaaacttaccctaaatgtctatcaaatgatgttttaaaagatataataaaaagaatgtttactaaaataatgaaaatcaacaagagagatataattggaattggtatttcttcaataggtccagtagatgatataaatggtaccatactaaatcccccagactttggaaatgtatcaaacctaaatatagtagattttataaaagaaatgtctgattttccaatatttttgataaatgatgctaattcgggtgcattagcagaaaaaatgtatggtttaggtaaaaatatatcaaattatatatacctacacataatgaatggtattggagctggtctagttctagaaaataaacttcatactggcaacctaggacaaagtggagaaataggacatacatcaattaattttagtggaccattgtgcagttgtggtaacaatggatgtttagattattatacaagtgtcagtaatctaattaaaagaattgaatcattgagccatatttatcctaactccccattaattaactgtaaagatttttctttagtcaagttaatagatgaggcaaataataaagatagtcttgccatgtttttgcttgatgaattttgtacatacgtatcatatgcattagttaatacacttacattgattgattgtagttctataataataggctatgactttaatatacctggtacatttatagaaaatacattattaaaaaaattgactgcttcagcaagtttttctaaatataaaaaaataagtgtaaggcattcaaattttggagcaaatgcaccattaattggctctatagccattgtaagttataatttttttaatggtagtataaatttttattaaatatgtaaaatatttaaacacttttattgaatatttttccatttaatattattatattttataagagcatttaaaatttggaggtataaaaatgatttcagctaaaatggaaaaattacttaatgagcagattaaccatgaattatattctgcgtatctttatctttctatgtcttcttaccttgaagcagaaggacttaaaggattttctaattggttttatgttcaatataaagaagagacagaccacgctatgtttttttacaaatacttacataatgtaggaggaaaggttcagcttgatgctatcccaatgccagattcagactttacttctgcaatggatattcttgagcgtacgttagctcatgaaaaaaaggttacagctttaataaacaacttagcagctgtagcaaactctgaatcagactttagaacttctcaattcttactttggtttatatctgaacaagcagaagaagaaacaaattgtgaagacaatataaaacgtgttaaacttgctggagagggtggtctattctttgttgaccaagaatttgctaatcgtacatatgcagctccaacaaacccacctgtgacaatataacgtttaaaaatttttaatataataaagaaggtgttttaatgaaaatcaagattgattcttatcattaaaacaccttttattattcgttttatacgtagtattttattgtttatacagtgctatttcacaattaaactcaaaactatactttcattttaaaatatttttaaattaaatttggggtgactgaaaatcacactatctaacttacaaaatgtgattttcagtcggtgctttaattatggttgaataccaaaacttataaactatttatatttaactattaaggcatctactgcacatacgccttttcctttaggatatacaaacactggatttaagtctatttccttgacttcatccttattttcataagcatattttcctaatttgaccatcatatctgcaagagcatcaatatcacaaggctcacttcctctatagccatttaaaagcttaaatgattttagttttttaagcatcataatagcttcatcatgatttataggtaatggatataatgtagtatctttaaatacctctacaaatactcctcctaaaccgactaataacattggtccaaattggtcatcattagttataccaataataatttctataccactttctaccatttcttgaactaatataccatcaatattagcatctggttttgctttttttacattagttaaaatctcattatatgcatctactgcctcatctctattcttaattcctattttaactcctccaacatcagatttgtgcaatatttcagaagaatttatttttaaaacaacaggatacttaatatattttaagatttcatctaattcatcaatactttttgtattaccttgtcctggaactggtactccatattttttcatctcaatcttactatctaattctgataatgctactacattatttgactctcttttcttaacagctttaaattctaaagttctttttgaataatcataatctataaacttagccattttattaaaacaagtaaatgtagttccaactgatgacattataggcacttgattatcttctaatctagtcctataatctaaatatctatttccttcaagtgtaggaactgcaaacacaggttttttcaatccttgttctctagcttcacttacagctttacaaagggtttcatgcatttcattttcttcatctcttatatttgcacctaccatagtaaatccaacactatcatccttttcaaaggtatgtaataaacctactatcatatccttttcatggaataatgctgttgtagcatctagtggatttttaggtgttgcaaatcctggaagatattttttcatttcttctttagtttcagaagatatttctgcaagttctacaccattttcttctgctaaatctgcacaaatagtattttctcctcctgagaagtttattgctgcaaaattagaatttgcaggtaaattaccatctaaaacactaaaagcttgtgctaaacacataaactgttctaaattttccacagaaattactccatatttttcaaaaatactttcaaaagctttactcgaaccagctaaatttcctgtatgagaggcagcagaaatagcacctttttctgaccttcctgatttcaatattattactggctttcttttttgtgctgccctttttaaagcatctataaatttttgaggattttttaaaccttcaaggtaaattgctattactgatgcataatcatcatctacaaggaaatctactgcatcttctagtgtaactatatttccatttcctgttgaaaaaccataagatatattaaaataatcacttgaaacaatttcagcagttataaatccactttgacctacaattcctataccaggttttttagtatctaaagcccatttagaacctcctgcccatagattaaccttatctatacaatttagcaaccccatgcagtttggacccaatattttcatatcgtatgtatttgatatttctataagttgattttctaaatctgtaccttcctctgtaccttcctctgcaaatccactagcatataccactgctgcctttgttcctaactctccagaatcttttaatacagatggaactacatttctaggcgtacatactactacacagtctactacttctggaacttcttgtatcatcttataacattttctcccaaacaattcttctcttttgggattaacataatatactctatctgtttccttactttttactatactaagtgctgcacttcttccaaaaccaagtttatcagtcactcctactatagcaatactttttggtctaataagtttttccaaactcataaattcacgctcctatatgtttatagttgtgattttaagtgaattttatctcaagatgaagtttctcttggcactaaagattattaaatcttgagataaatcacttaagataagggtaatttatcaaatggcgttattatagccttccatgaatgctgcttcattttgaacattaaactttccttttcctttttcctcaaagaaatcacacatagtttttaaagctaattctttttcaagtaacccagttttagcaattaatgctccaagtactactatatttgctgcttttggattgtttactttttgagctaattcctgacaatttattttaactacacttatatcttctcttaatgttacattctcatctattgcagatgtattaataactactgttccaccttctttaactaaatttatataatctaaagatggtttattcattgctactaaaacatctatttcttccatatcaggcccacctatactctcatcagaaaactttactacactataggcttttccacctctcatagttggaccatatgcaggcatccaagttacttgtttccccaattcaagtgctgactcagctacaatcagaccaagagttaaaactccttgaccaccaaaccctgcaaatactagctctttttccataactattcaccatccctttgcttaaattcgccaagagcataatatggcactatttcttcttccatccatttgatagatttctctagtgatacaccccagttagttgggcaaggtgctaatatttcaactaaggaatatccctctccatttaattgagcttctattgcattttttatatatttttttagattaattatttcctttgggctatgaactgaacctcttgctacatatgctacatcaaagaagtttgccaccatctcaggaactttcagtggactaccagtagtctttatatctcttccatttacacttgttgttgtgacttgacccggcatagtggtccatgacatttgtccaccagtcattgcaaaattattattgtttattacaaatacagtcacattatgatttctatatgctgtatttaaagtttcagaaagacctataacataagcatctccatcaccttggtaagtcattactaatgtatctggaagtgctactttaactcctatagctgtagatgaagctctaccatgtgcagtttgcatcttatcaccattccagctaaaattcatattgcagacacaaccaactcctaatgttaatacatgatttttttcatatccatgttcttctattacctctgctattatacgatttactattccatgaccacaacctgggcaaaacttgtttggtattgaaacaacgctaggtgttaatttttctgtagccatattagaacacctccttgatttcgccagattttattttgctataagtgtccattacttgcaatgtttttggtatatgatttccactaaataaaccatacacaggtacattttctttacatactttctttgaggctaaagcaacatcttctactaattgacctgtgtctgttgattctactgagataaatccttttacatctttacttaccttttcaaatgctttatatgggaaaggccatactgttattggtcttattattccaactttttcaccttgttctctaagtcttctaacagcattcatagttgttcttgatggtataccgaacgctacaaacacatattctgcatcttctacttgataatcttcccattgttgttcattttcagttattctcatacgtttctccatacaaaaagttggcttttggttatctgcaacctttgcatggtctctattacttccatcataagtccaacctaaatctccttctctcttcttaaattctggaaattctactggttccatcatttgacctaaagctgcttctgtcaaaatttcgacaggcactctgtatttttccgctacatcaaatgagttatacatcaaatctacagtctcttgaatactgtttggtgcataaactatcaaatgataatctccatttcctccccctctagtatctcttagatagtctgtctgtgctgagtccaatgagccaagaccaggcccccatctctgtacatttacgattacacaagggtaatgatttgcacataagtaagaaatcccttcttgttttaaagatattcctggtcctgaagaactcgtcatagacctcattccacttgcatatgctccatataccatatatatagcagccatctcattttcggactgtataaaagttcttccaagttcagacattctatgtgataaaaattccattacctctgtttgtggtgtaattggatatcctgcataaaattcacaacctcctcttagggctgcttctgcaatggcgtggttccccttccacatctttttcatattatcccaactccttctaagcctcttgacatgctttttctttaattatttcaaaaacattatctggacacacctgatagcaaattccacaaagtatgcatttactctcatcaacttctacatgagcataaccttctttatttatcttacttgatatttttaatgctccttttttacaagatataacgcagtattcacaacttttacatctctctgcgtttatttttaagttcatatctacaccccgtttcataatatttctatctattatccaatacttggctctcctttaatatttaatatttcctttaaaactgctacaaatttcttattttcttccatagttccaatacttacacgtgcatgtgtagcacttggtcttattacaaaccctctttttttcaagtcttcaaataacttaggtatatctgttttcatatctacataaaggaaatttgattgtgaatctacaacatcaaaccccatttttgtaaactcttctttaaagtaagtcattccaactctatttaattcatatgtttcttttataaactcttcatcatcaagtgctgctgttgctccacttatagcaacacgatttgcagagaaaggctcttttactgtaaataaagttcttattatctcatctttagcaataccatatcctactctaagccctgcaagaccatatattttagagaaagttcttgttactataacgttataattttcccttacatacttaagtccatccacataattaggaactgttaaaaattctatatatgcttcatccaatatagttataatattttcagggactttctttaaaaattcttctaactctttatcatccacaattgttcctgttggattattagggttacatacacatattaattttgttttatctgtaatcttatctaatataccttgtaaatcatacttataatcttctgttaaaggcacttctactggtatcccttcattttttatagttgcagttctatatgatggaaatgttgggttacaatatataacttcatctcctctatttataaaagcctcacctattagagtgataacgttatccgcaccattagcaacaataaaattttctggttttaaatctagcttttcagctaattttcttctaagttcgttagcttctggctctggataaagttgaccttgttttagcatttcaatcatagcttctattgcttttggtgatggtcctagaggattttcatttgaagctaattttattatttcttttacaccatatttttccttaactttttctattggttcacctggaacatattgatgtaattcttttacggtatttctcaataatttttctatcatttttaaaagccccctctgtatatgtattttgatttatataaacgctattgcgtctacttactttaatagcttaaattaaccatctacttaactttcttttaactaagcatttctttgatttaactcttctcttatttggtttaatttcttgtcacttactggatatagtattgctataacaacagctattattaaaggtattgccatagaataagaaatcatatttataaaacctgatttaactgcttctgtgactaccatatcagcttgatatcccattgagttcattaaaactgttcttatagtagttgcaagtaatactcctacttgtattgcaactggatatagtgacatacttaagccaggtaagtcttttcctgatttccaatgcccataatcacaagaaccggcaaagaaattaagatttattattgatactacatttgaaaaacctccaccaattgccagcaacatagttactcctaaagtagttttcccccaaggagtccatgcaaccaataagtggcatagtgcacatatagaaaaagaaattattgaagctagtttttgctctctacagatttttataaacactggtgcgaaaaacatgaatgctacacttaccaaaggcatgattgataaaaatactgctaatccacgttcatcttctattacatatttaaaataatatggagccaaaggtcctaatcctatagatcttatacatataagaaattctaaacaaaatgccatcataagtggtacattagtgaatagagcttttgccatttcacttgctttaatctttggcttctcttctttttgaagaacttcttcttctgctccagattttattatctctgttgaagaaaaccaaaatactaaaaggcatcctgctgcaaagaataagtaggtacctaaataacccattccttctccacctaatacatctgcaaataaaactaataataacggatatgaaaaacctactaagaatttaccaacttctttaaatatattagtagtagttgagcctataactcggtctctaggtgtcttagcaactacagggtaaatagcataaattatagtgaaaactacttgctgagcacaagatgctattaataataaagctgtcatcaaaggtaaaagtaatgctggacttattttcattaatggaactatgaaaaatattccatatgttaatgctaacgctgctggtgcatatctaagccatggataatactttccttttttgaatggttgtttgtcaaatactgtacctgttataggagctacagcaatttttatgaaagattgtataatttgcataccacctgccataattacaccaagttttgccacatcagttaaaaaaatatttgtaacagttgatacaaagtaacctataaaattgtacgctaagtttatagaacttgaatatgtgtatattgctcttttcttagggtctctcatatcatctctaaaatttgatataagatttccttttggtttgctttcttgactactcacatctacccctcccttataaaattttcttacttttcattattcacgtataataatatatattttgaatcttaaatatctcattcttgattcaggagtatatttttatatgtgtataattttaatttaattatattcttaaaattcataattgtcaaacactttttaagttttattttttactactaaaattaactaaaaagctatttaggcttaatttagatttgttttttattattttcttgtcttgaaatgtcattgaaatgcgtattttaaattattttatcatatttctagtgattttaaatttttataattttattcaagaataatttattcaagatatttctatactacatccagatattaaaaatatctttttcttatttagattccttttatttttatacatgtactattgatttaaaaataaaagcgtgttacaattacaaaaaagaatctatgagataaatatcaatatgcaaaaatttcagaattttcaattttctatttttacgtaatttccatctaatatcataaattattatagctatattaatctaaaaccaataaaacaaatatcgtactacttttatataaaatatattttaaatatattttatatattttattaaaatattttataaaggagaaaagactatgttacttttaattgttacgtgtgcaatatacatatggattggtttttatttttcaaaaaaagttaaaacagcatccgatttcctaatcgcaggtagaaatcttcctttgcctatactagctgcaaccattgctgctacatcttttggaggagggtgcttagttggtggagttcaatggggagctgaaagaggactttgggttggaatgtattctactataggtgcagctttagcttgctttataaatgcctttttcgcaggaaaattaagaagcttatcttgtgatataacacctgctgattatattgaaactagatatggtcatagtgtatttttaagagcttatcaaagtcttgtaacaccaatatctatactagctattatgggtagtcaattaatttcttttggttctgtatctactgcatttggtattccttatgatatagctgtaattataggagttatagttataattatatatacttatacatcaggaatgtggggagttgcagtatcagcatttattcaacttgctatttgtatagtgtttttgccaatagtagcttatataagcttaaaattagttggcgacaaccctttacttatgttacaatcaatggtaaaagaaccattctttccaggaaataaatcgattagtgattttatgtatacagttttaccattagttttaggctcaatattttcttatgaaagttttttaagatatcaatgtgctgataatgctaaaaatgcagttaaaagtagtgtaattgcaggatttatactattatttcttgccttccctataggaataattggagctattggtggtagtttatttccaaacatatcatctgttcaggttttacctcaaatgatatcgactactttgccacctttaatatctgtattattcttagctgctatattggctgccataatgtctactgccgattcattaatgacctcaatgagtgctattatatcaagagatatttataacaaattattacatcctaatatagaatttaatgatttaaaaaatactctaaagtattctcaaattgcatcagctttgacagctataataggtgcaatcatagcacttaaatttgatagtttattagaattattgttttggccggctccattatgtacaggtgtaatatttgcaccatttgtaattggtctttgctggaaaggcgctacaaaaaaaggagctatctatgctgttatagtaagtgttatattggcattattaaatatgattggtattcttactgtatttgacagaattttggttcctataataggtggttctattacaatatttatagttagcaaattttcaaaaaaagattgaaaagagaggtatacacagtaaatatgtcaaaatcagaaaagggcaaagaaacaaaagctagtattataagtgctgctagagaattattttttgagcaaggttatcataagacaacaactaggcaaattgcagaaagagctaatataaatttaggtctaataagctattacttctcaagtaaaagcgaaataggagctataatatatgaagatataagaaatgaaatgcagtctttaatctataactaccatgaagaaggtactatgatgatgttctttcttgctatgaatgctgacctttgtttccttctaaaaaacgaagcatatagaaatttttatttggatatagcttatgaagaagctattttaagctatcaaagaagtgtaaccgaaatggtcatgaaaagatatgttaatgataaagaatctatagaacatgatgaattaatactttcttgtattggtatacttgctatgaaacctgaaataattagagtttatacttcacacaagtacgatatatcttctcaagctgtaataaagcattttacaaaacagtttcttattaatcttggtcatagtacggatttatgcgaagagattttagaggaattgagtaaatactatatagatatagttgacaattttactccaataataactcgtgtaagaacttaataaaattttattaaattcttatagactgaaattttaaaatcataatttgattttaggatttcagtctttatcatatttaaagatattttatagtatacctgttaataccataagtgtactacccaattatatctataaatttctttatccataaattccaaagacgccattcatgcccccctacacactcttcatattcaacatctacacccagagactctgcatattttttaaacatctgattatttttatataaaaaatctctatcaccacaaaattgataaattttaggaatatcttcatttctttctttaaggttcttaagtatgtaaagtaaatcattctcactatttctagcgtcttctggtctaccaaaatcgtgaaataaaatgtctgcattggtttctatttgttgattttctaactcatgaatcatatcaggcgaaccagaaaaacttgcaactgccgaaaactcttttggttttgaaagtgctaattttaaagctccatatccccccatagacataccagctacaaagttatcttcccttttatctgataaaggaaatatagctctaacaaatttaggtaattcctcgcttacaaaagtaaaatattggtgtccatacgccatatctgtataaaaactagtttctactcttggtattactagggctatatttttatttttagcataatgctctacattagtatatctaatccatgagctttggtcatcttctaaaccatgaaataagtataatgttttaaatttaccttcaaaatcatatatctctttaccactaaaaagttcttttccatttgctacaggcaaaattacaattatatcagtttctcctccagtatatttagatttaaatttacattctataaatgccacaaaaaacacctcttctataataattttatatctaaaaagcaccaagagtttaactttctcagtgctttaaatattgcttaatttatatatttttaattatacataatattttttagctacatgtaatcggaagtatctgtcggtaatccctttttgtccaatttactttcaacaatatccttaattatagaataaattactgcaaacattggaactcctataaccattccaataaaacctaataattttcctgcaaccaataaggagaacaaaatccaaaatgcagatataccaattgaatctccaagtattttaggtcctataatatttccatctatctgttgtattattaatataatcaacaataaccagaaagcttttataggagatacaaacatcactattagagtagatggtatagctccaaataaaggtccaaagaaaggtataatatttgtaataccaattataactgatattaataatgtatatggcattttaactaatgtaagtattacaaatgttagaatacctataatgaatgaatctaatattttgccacctaaaaatcttccaaatgtatagttacttctatgagttaattctaaaattctggcagcttgtttttctgtaaatactgcataagttatttttttgcttaatccatagaatttttctttatcaattaataagtatactgaaacaattaatcctagtacaatattccatatactagaggctacattctttaacatacttcctaatattgggattaaatctgttacaaactttataatatatgtaacaaactcattccacttatcaactgccaaattaaagtattgctcatcaagatttaaatcagtcattaatttatcaataagcttagttgcattgtttacatacataggtatatcatttgctagtccaacaatactctcaattacttgtggcaatacgaaatgcataaataagtaaagtatcaatgtagctgttgcatatgttaataaaagacccaagcctctttttgaactttgttttagtttttttaatttctcactttttataaaaattctgtcttcataaaactttaaaataaaattaagaagatatgcaatagcaaatcctattataaaaggttgtaatgttgtaaatatagcatctaaattattagaaaatacatcaatttgtgatgatactagataaaatataatactactagcagctattataaatgtataaattgctattgttgtgtattttgtattccaattaattttcattttttcctccttatttctatataattaaattttatcacaaaatcaccacttttataacaaatataccaaattaaaaataaaatatattcagaatacaaatactcaattttatttatatttattattctacaatataacctacattatctttttaagaaccttaattaatttattatcgtatggagcatatctaatagggacatccaaatttaatttttttaacacactcttatagtgagtaaatgtatcgaatccagcttttccatgatatgagcccataccactttcaccaataccaccaaaaggtaagtaattcgtagctatatgagtaactgtatcattgatacaacatccgcctgctggaatcatttctaaaagtttattttctaggtacttattttttgtaaaaatataaagtgccaatggatttggcatttgtataattttttgtattacttcatctaaatctttatatgttaaaatgggaaatataggcccaaatatttcttccttcattatattatcatcccaattaacattgtctactatagttggctctatctttaatgtctccttattataatttccaccatagactatcttatctttatcaataagagataatatccgattaaaatgtctctgatttatgattttaggaaattgctcattattacatggattatctccaaaatacttattagtataatattttattttctctattaactcattttttctatcttcatgcactaaaacataatctggagccacgcaggtttgtcctgcatttattagttttccccaagtaagtcttttggcagtaaggtctatattagcatcttttaaaatgatacaaggactttttcctccaagttctaaagtaataggagttaaatgctctgatgctgatttcatgattattttaccaacattagtacttcctgtaaaaaatatataatcaaatctttccaatagtaacttttcactttcttcttgacttccttgaacaactgcaacatattcttttgaaaaagtattttcaactatgtctttaactacactagatgttgacacagaatattcagaaggttttaatataacacaattccctgctgctaatgaccaaactaatggtataagtgctaattgaaagggataattccaaggtgacattatgagagtaacaccataaggttgtggaacaactttggatatagatggaaaattaaccatacttgatttaactctttttattttgctccattttcttatattctttatagcaaagtttaattcactataaaacatgcctacctctgtcataaaaccttcaaaattcgatttatttaaatctttctttagtgctaaaagtattttttcttcattttgtgatacaactaacttaagtttcttcaactgttctatacgaaacgatatatctcttgttttacctgtattataatattttctttgcattttaactaactcttttatatccattgttaaaaatcctttctttaagaattatattaatacatttttagaaaaagatttaaatttatcctaacattattttttatatcataataaattcatctcaatataacataaatcttccaataaaaaaagccccttattaagtataagtaagcttataaaataatttattttaaaataaacattttttaaaattataaccttattgaaacaattaaattatccatctttaataatattattttataaataatgtctagtaagtttctatgaaatctaactttagataataaataattataaatatatacctcttaaagttttcttatataattaagtattggagttaaattttctttattacaccaatcaaaggcttctccagacaataaaggtgcttctgctggtttaagaccttgacgttcttttttagctatagattttttaaaaaaactacaaagagtataatctataaaagacatttttgtctcatcccatgccccacgacaataaaagcaaggaactttgtttaattcatccttaaagtttacttctcttaatttctttattacttcatcatcatatggagcagctcctacgccaaatactactaaattttttttctgcaaatctttataatttttttttaagaaagaaattcccgctatattacaagcataaagacctcctcctaaaataatcgtatcatacttcataaccttttctatattaatattcttagtttcaaaaatatcacaagacaataattctgaaagccatttagcatatttttttgttgaaccatacttactcttataaatcactactacacttttcatataaattacccccctctctgatgtcatacaaagttgatttgatacttgcttattctccaacgtcattattttctacataatttttcacattttcaattcctatacttaatttcataattccaaaaaataactgttccacttctttctctgtaaaatcttcaaataaaagctgtaatactttttcctgcatacctcttacttttttagaatactcttgcactctatcttttgtcacaagacagatagctcttgaatctttttcattttgctcaatttgtataaaacctttcttttctaaagcaatagctagtttttttacattttgtcttgagcaccccattaattctccaagtttggttaatgtaagagtttcatctacagagtccgcaatagctaaaagtaaccattgtttcattgttaattctgggtctaatttatcacatgtagtttgaagtttattttgcattacaaatatacttgcaaatatagcttgttttctactatcatcatctaccatatattttttcattaaactttctgcatccattattatacacttctctttatcttagattttaattttttgataattttaaatagtaactagttactttatattatagtaattagttactattgtgtcaataaatttatttttattataaatggcaaaacggcatagcattatggctataccgtttcataaaatcatatttacaatcaatttataataaattataaattaaatatattttaggctataataagtttttcaaaatttactctaaagcatactttttatacttattatattctatattgctacattctacatctaaaatagctccatcttctctgtattctgtatttataatgctcgtattttcgttaaaataagaaactacatgacctttatcatatggaattaagaacttacatcttacacaatctttaaatatgctatcacaaatacattttatcattttatctatatttatatcttttttaactgaaacaaatataccttctttatcgatactatctaaaattctatccaatacttctacatctattaaatcaattttattatacacatgtatcataggtataccatctgcacctatttgttttaaagtatcttctgtcactttaatatgacttttatagcttggatttgaaatatcaataacatgtaacagtacgtctgcctcacatgcttcttctaatgttgacctaaatgcttttactaagtcatgtggtagattacttacaaaaccaacagtatcagataataaaaattctttgttatttgcaagaactatatttctgacagaagtttcaagtgtagcaaataacatgtttttctcaaacactttcttttcttcagagtttttaaatatatctactagtttattcattattgaagatttaccagcatttgtatacccgactagagctacatttggaagatttgattttcttctcatacttctttgagtttctctttggaattttaaatcatacaactccctatttaaagatgttatcttttcttctattcttctacggtcaagttctaattttttctcaccagaacctctatttttagtaccaactccaccactttgacgtcctaaattttcatttgaacctataagtcttggtaacatatattttaaacttgctacttctacttgaagtttagcttctctagtttttgccctttgtgcaaatatatcaagtatcaatgccgttctatctataatttcacaattaagcttttcttcaagattttttagttgtgatgtagaaagttcattgtaaaatataactatctctatgttttctttctttattaagtttaatatttcctcaactttacctgtcccaatgtaaaatgctctattaacctgctttgcattttgagttatactccctacaacatcaatatcacatgctgaacataagttttcaagttcaatcattagttcattaaagtcctcagatttattatttatgtttaatcctactgttattccttttttcgtcatatccatattctccttatctgctattttttatttaatctatagcacgagattatggctctataattaaattcatcaagaattttgctttttatcttatccttaaatgacacttcttatttactattataataaccataatcgtgcattattttctcaatcttatataaaaaatcactttcttacacctcctcccaaatatattatgcagttttttcaataaaaaaactccttacaaatctaagtaatacaaaacaagctacttatatcataagaaggattaaaattctaaatatatattaaaaatacattagtttaattaacttatatgtaattatcattttatatttaaccctattcttaaatttaagtagttatttgcatgattaataaaagtaataaaaacatatacttcaatataatcatcaactattaaaattaaattctatttataataaaatttaaagaataaaattaaatatacattttgataatcacctccaacattttccttactacatattataataaaataaacactttgtaaagacataaaattatgtggctatctcaaaatatagataatcctctttttcattgttaaaatgataaaaatacactttatttcatacacaaaagagtgccttatgaattaaaaagttcattttaaggcaccctcatttattttatcttattaattacatgtctatgctaagatagttttttgttacattgcttcatcttcttcaaattgagaattgtaaagattggcatagaatccgcctttctttagaagttcctcatgatttccttgttcaactatatctccttcattcattacaagaatcatatcagcatcacgtatagttgataatctgtgggctataacaaaacttgttctaccttccataagattatccatagctttttgaatcaatacttctgttctagtatcgacagaacttgtagcttcatctaatattaaaattttaggatcagctaaaatagcacgagctatagtcaataattgtttttgaccttgagaaacattacttgcttcttcatttaatttcatcttatatccatctggtaacgtcttaataaatctatgaacatgtgcagatttagcagcctctataacttcttcatctgtagcattcaacttaccatatcttatattttccataattgaaccactaaataaccatgtatcttgaagaaccataccaaacatttctctaagctcactacgattaaaatctttaatattatgaccatcaatcagtattgaaccgctattaacatcataaaatctcattaacagtttaactattgtagttttacctgctcctgtaggtccaacaatagcaactttttgaccaggtttaacatttactgagaaatcatttattatagtcttgtttgggttatatccaaagttgacattttcaaaatcaattttaccttctaaaccatctattgaaactgcattttcaacaatttggacttcttcttcctcttctaaaaactcaaatactctttcagaagctgctgctgttgattgcaataaattggcaacctgtgcaatctgagtcattggctgtgtaaagtttcttacatattgtataaatgactgtatgtcaccaacctcaattgttttcttaattgcaagccaacctcctaagattgataccattacatatcccaagtttccaataaacatcataagtggttgcattatacctgataaaaattgagatttccacgctgaattatacaggctatcatttagtttatcaaactcttcaattacttcatcttcacgattaaatgctttcactattgtttggccactataagtttcctcaacttgaccatttacatttcctaaatattcttgttgatatctaaagtatttttgtgatttctttattattcttgaaattacaaacattgatattggtaatattaaaactgccactaatgtcataattccacttatagataacatcattatcaaaacacctatcatagttgttactgatgttataagctgtgtcatactttgatttaaactttgatttaaagtatctatatcattcgtaattctcgataatatttcaccatgcgtcttagtatcaaaatacttcattggtaatctatccaattttgctgaaatctcttttcttaaattataggatactttttgagaaattccactcattataaatccttgtataaaagagaacagtgcacttatcaaataaaggaaaagtaaaaaggttaagatttttccaattgcattaaaatctatacctacgtttcctccagaaactttactcactaacccttcaaatatctttgtagttgcctttcctaaaatttttggacctactatagaaaacgatgcactaccaatagcaaatacaattactaaaattattgatattttaaatttagataaatatgcaattagttttcgcatagtccctttaaagtcatttgctttttgtcctgcttccatagattttcccataggacctcttcccattctactcattagctagctcctcctttgaaagttgtgataaagctatttgctcataaacttcgcaattttttagaagctctttatgtgttcctattccaactatttctccctcatttaaaacaattatctgttctgcatttaagatagtactaattctttgtgcaactattagaactgtactttcagcagtttttgattttaaagccttacgaagagctgcatcagtttttaagtcaagtgctgaaaaactatcatcaaatatataaacttctggattttttgctattgctcttgcaatagaaagtctttgtttttgacctccagatacatttgttccaccttgagaaatttcagttttaaaagcttctggtttagaatctataaattctgtagcttgagctatttcagctgctgttctcatttcttcatctgttgcgtcttttctaccatattttaagttggattctatagtaccagaaaacaatactcccttttgaggtacatatccaattttttcccttaaatcatgttgagaaacattttttatattaactccaccaagtaatatttctccttcagtaacatcaaagaaacgaggaattaaatttataagagttgacttaccactaccagtacttcctataaaggcagttgtttctcctggctttgctgtaaaagatatatttgttaatataggttcttctgcgtctggatacatgaacgaaacatttttaaattcaacaagaccctttttatcttccttaaactcttgtgcctctgatttttctgggtcttttatgcttatatctgacactaatacttcatctatacgtgtagctgaaacggatgctcttggaagcataatagataccattgatatcattaagaatgacattattatttgcattgtatattgtataaatgccatcatatctccaacttgcattgctccagaatcaacactgtatgcacctctccaaactataagaactgtgataaggttcattataagcatcatagcaggcatcatacatgtcataactctatttacaaaaagatttgttttagttaaatttttatttgctttatcaaatctttcttcttcatgtttttcagtactaaaagctctgataactggaataccagtaattatttcacggcttactaagtttaacttatcaacaagcttttgaaccagtttaaacttaggcataaccactgagaataacactacaattaatgataagatagcaactactgctactgctataatccaggccattgaagtatttgtgtttaaaacctttatcactccacctatagccattataggtgcatagaatactattctaagcaacataaccatcaacatttgtatctgttgaatatcatttgtactacgagtaattaatgaagctgtagaaaattcattcatttcagtatttgaaaatgacataacttttctaaatactccacttcttaaatttctacctacacttgctgctactcttgctgctaaaaatcctactgttattgtagctaccatactaatcattgctataccaagcattttagcaccagtaaataatatataattattttgagttttttctgtatcaatacctattttctcatattctgaccttacatatgaaacagagctttgtgttatcatactctctggcatactttcaaagcctttgctcatctctttagtcaatgtatctaactgttcctttggcattgctgataacaatttaaatatatcaacatctccactttgagtagcttgtggtggaagtttactcattaactgagctttcatagcttttacctctttactatcgccctcaagccctgatactattaaaatagctttaccaaaaataacatttaaatcatctatagtgtctttgtctttagtatttaactcataaagagattcatcttttagacctgggtacttatctttatacttaacataatcctttttattcagcaaagtataattatctagtactttatccttactacttttatccataaataaagtaattttatttaattcactctctctaatcacagatggaacagagttttctactccaccttgttgtatacctacatttactatattggatgtgtattctggtaaagaaaggtcacataccgcttgaattaccaatagacagactattattactattgataatgccgatttctttaaatatttaattaatttaaacatacatttcttcccttctgtaatattaattagtctaataacattaaattgaaaaacattattttaaactttaaaaatatttttcatcttcatgcttatgacatcctgcttttaaattatctcgtacttgcattagaagtcttctaagtactattttttcttcttcactaaatcctaaaaaaaactctctttccaattccttgttaaattcttcaactttattacatatttctaaacctttgtctgtcaaaaaaatcctagatactctttggtccttttcatcttgttttctttccacaagtccagctttttccatcctctttatcataactgtagttgtagatgcttttactttccttttatctgctaattctttttgactttgcccatctttcatctttaaagaaaaaagtatttggggttgaccatgatataagcctaatttatcaaaataaaaatgagttcttataaaatatattcgcattaattgcaagaaaacatcatttaatttttcttcagaattgctattcatacttgccctccttattttttatattacttagtcggctaagcattattttactatactgcatgcattttttcaatatatttataaaaaattcatataaatttcatttattaaatatttttatatcatatagttataattttaataaataatagtaagatttttaattagtcagctacttatattttttattgtaaagcttaaaataaaccttttcatatattttcaaataaaaaagttgtcccaaaataaattttgaaacaacatcatattcaacagtatcttgattatataacattacaatactctacttatcttcatatccatttacaacaacgtctaacttcccagtttcaggtgatataattagaccatgtacaataataccatctggaattaaaggatgcccttttattaaatcaatactatcttttacagattcttctgcagaatcgaatccatgtaaccattgttttgtatcaattccagcactacgaagtgtaagtattacatcattagatattcctctatctaaaattttaccaagtaacttatctgtatcaacattacacataccacatccatgatgccctacaaccataacctcatctacatcaaattcgtaaattgcaactaaaacacttctcataatacttccaaaaggatgcattatagtagctcctgcattttttattagtttcacatctccatttttcaaattcatagccttaggcaaaagctcagttaatcttgtatccatacaagataagactactatttttttatttggatgttttgatgtcacatattgttcatattctttgttctctacaaatgatttattatattctaatatctcttcaagttttctcatatgtaatatcaccctctttaaaaatttttttattattatatcactattaaagtacaatatatacacatataatttaatttatatttattaaattattttataagattattactctactataaatcttgtatataacttgtatttataagtatttgtatatttattttttataatctaaactaatattatatattttcattatttttttaattataatttttttaaaattttattctaaatgccttacttataattaattttttatttcacctatatataattagatttaaaaatgtttaccttaccaatataatgattaaactcaaaagtcttattgaaaaattttctatttacataaattgttcaatatataaaatagaaaatttttttaattttcaaaatatattctacatatctaatatgtaattacaataaaaaatgctataattaacatattattaattcgttttattattgtagtatggctatgaaattatgaaaatatttctctaattaaaaatatgatttatccatatttgtttattgtagatacagactatacaaaaataaatagcacttatttcagtataaaaacatatatagtctatatttagactaaaaaagtataaatagtctatataaaacaacttaaactatgaatataatctaaagtggagggataataattggcaaatataggaaaaataataggagatagaataaaagtctatagaacaaaattgggatatagtcaagagtttctagcagaaaaggcaggtttacatccaacatatattggtcagattgaaagagctgagacaaatacatctatcaatattataatgaaaattgctactgctttagacataccacttgaattgttatttgcaaatattattacaacagaaggcgttgataactctgtacctttagaatgttatgaaatgattaataaattaactgaaaaagaacaaattgcaatgctagagttaataaagtgcatcattaaatacaaagaaatataagtgagggaaatagtaacaataatgaattatataggtaaaagacttaaagaagaacgaaaaaaagcaaatttaacttcaaaagaatttgcaaatatggttggagtatcgccttggtatataactcaaatcgaaagtggtaaaaagaatccaagtcttaaaacattcataaaatttgtaaatatattaaatatttctgcagatgttcttataaaagatattacttccactggaaaaacatatttagaaaatgatataaatgaagagttaaaagacttaaattcaagagaactaaatctgatatcacagattatagacatcataaaaaagaataaaatataattctttatattttatataaaaaaaaaggttatttgaaataaataacctttttttgtctttttgtgttaacattgtcttatagtgctaatgagtactattagaccatgttctatggccttattttaatataaaacgattggagataggctatgattgtgattgaaggtagtgataaatttaagattgcaaaagaatatattgatgtagaatatactctttttagcaaagtaacttttaggtatgaaaagttgaaatttaaagataatgctgaattggaaaaaattaagatgtttaaatataaaaatggctacatccctaataaattaaacctttcttttggatatggattctcttcttataaaaagcaaataattagagaaactgtagatactttaagattgacagaaattttttcaagcgagaacatagaagatattaaatttataaaagatggtacaaaaaaattagaaattagcatagagaaagttgtgaaatttaaacgtcgaaaaaaaagaaattatgtttgttgctattgccctgatatgtatagagatataaaactcgacaaagaatctatcaataagatatacaacagaaaaataaaaatagaaagagaagttaatatttttgaagatgaggatgttataataaacaagaaagtattgaagtttccaaagtcttggacaaagaatatgcaaaaatattggttaagtgaaaataagtatcccatacattctactgtaattgatgatgatagatataaatgttgtaatgtacaatatacaaaaaatagagtgataatattatattacatatataaccattaatatacataattacaaaaaaataatgacaaatatacataatacaaatatatcttctactttagataaaacagttattatgaaaacttactatctataaataatagaaatgctagtataccatctataatctaatgtctagtaggttttaatggcatattttaaatatgccatagttgatttataagattttctatatcactttcaaaatacacactaaatagttgcttttcagatataattgcccaatttaaattttactatctgaaaagttttttatatttaatttatatcttcaaaaataccgtctaatatttctatataattaatttaattaatactcttatgtaatagattaagtactgaatttaactctttaaatgatatttgccctggtgctgaaacactttttgcagctccaaaagtcaatgcagaaccaaatatttcaccacacaatctacttataacacccattcctgacattgacattgttattattggtctatctgcataaattttaaacatttcatttgtagcttcaagtagcactaacacatctctttcattttgcggcataacagctactttgggtaaatctgcgcccaattcctgcattctacataaacgagatacaatctcttctttttttggagttttattaaaatcatgattagatataattactttcacttcttttttatgagcaaaattaactacttcatctatgacctcatctcccataaataactctacatctattaaatctactaaacctgtattagaaatttctttattcaaagtagtataataatctcttgatattaatttttctcccccttctactacacttctaaatgtgaataataaagggatatcatgtatataacttcttaattcatagagaacttccttaacttctttaatattttctacattctcaaaaaaatcaactcgccactctataatatccaaacatgcatcttttaactctttagcctcttttataatatcttttttatttttcccaataattggtacacaaattttaggtctaccttctccaatagtaatattttttacttgaacttttcttttcatattctcctccataatcagaaattctataggactttaaattctattttctgcataatttaattatacattaaaaatactatacattataaaaatactaatttaaaaataatttttattctaattcttaaaacaatcccacatattttagaaaaggtactctataatatacaaacacttcttttttacctaaatttattttaacattctataattttcacaatattctttaaattttactcatataaacaatattattctggatgctaatagaattaatctataaatcatagtataattatgcagaaataactcgaatttcactacttataaagagattgaatattaatgaatctaaatcatttgcattacttcagagttttgactaaagttgaacaccatacaaaagtagctactcaattgtttataccccaaccaagcttaagtaatgttatatagattcttgaaaaagaatttggtatctttttatttgaaaaacaaggtagaaatgtttccctcactaaatacggaagtttttttctaacctatgttgataaagcattaggttaattagaaaaagtttacatataaaatatattaaattgttgcaagttttattgttttgatatacaatcaactaaacatataatctttataaaatactatacagttaaaagtctgttttaaaaaaaaatgtataaattataaatcaaaatatagatactatcaaggagtgattctgtgaagagatgtattgtagtagtggaatagtcaaaaacataatatatattaaaggagagatttaaatatgactattccaaattcaaataaggtatatccaagaagtaatgattatcaaactgtatatcttaaaaatgtaataacaagggaaaatatagaagttggagattacacaatatataatgacttttataatgacccaagagattttgagaaaaacaatgtattatatcattaccctataaacaatgataaattaataattggtaagttttgctcaatagcatgtaatgcaaaatttctaatgactagtggaaatcactcaatgaaatcaaaatccacatatacttttcccatcttttatgaagaatggaaactcgatatcaaccatataacggacgcttgggacaataagggtaacattataattggaaatgatgtgtggataggttatgattctataattatgtcaggtgtaaatattggtgatggtgcaattattggaacaagagcagtagttactaatgacgtctcaccgtattctattgttggaggagtacctgcaaaaattataaaaaagagatttaataatgatacaatttcaaaattattagaaattaaatggtgggattggccatataaaaaaattcaatcaaacattaagcatattcaatcaggaaatattgataaattagtttaatattttataatttatttatattaaactttactttaataatccttttataagagctttttcaaaatttgtatattattttaatatatataaatttaatacaacattaaataaaataaaaagtaaagttacttaataaaaagttactttactttttattatttaaattcctgtttttattataataggtaaaattctattaaactagttcacattttcattattattgatatattatatatgaatataccattttgttttttaataaaaaaatcatgctacatcagtagtaagcaactattaatgtagcatgattttttgtatctaaataatcttagtatttacctatcaatatagattgatatatcaaaaactatagtcttctatattcttctctttttagcttttggttacttagatagtaatcaatttcatcaattagacgttgtttatcatcaggtaatacaccttttaaattagcataatttgatgcatgattacttctaaatacaattttttcattagcatctatattctttatcatctctttaatttcttgtaacacagccttatcctctagtattgtaaactctcctgccttaagtaaatcgtaaagttcagtattaggttctaccattaaactaagtacacccacataatctggtgaaattgctcctaacatttttcctgtatcaactgcatgctgatgtgtttttttagttcctccaagacctgctattacagtggctgataatttaatcccactttttttaacttttctaccaacttttattaattgttcactactaaaacctttcttaatatcttctaatacttcattgcttccactttcaagccctagataaatcattttaacaccaagttttcttaattctttaagttcatcatcagattttttctctatagatttaggagagccgtacatagtaattctttcacactctggaaaaacttcttttatatataaaataatatctcttaatttctccattggtattatcaatgcatctccatctgctaagaatattctttctacatgcttataatatcttctaaatatatcaatttcattttttattacttctagtggctttattttaaattttttagatttgtacatactacaaaacgtacatttgttatgagaacatcctagtgtgacttgtattataagactataagcctcacttggtggtctgtaaagtggcatatcgtattccatattaaaatcccccttgtaataaaatattcattctattatattattaatatttactttaaataataacttataaaattatattttttaaattttagtttaagatatattctttaaaaatttaatgatactattggcagtaatattaagttgtttttcttgacttataatagcatcattatctcccttttgttttccatagtctccaaattgtgcatgatttcctccttcaatctcaacataagttgtatcatcaggaagtttttgttttgattctacaagacttttaaaattgactactccatctttgctcccccatatagatataactttttttcctaattctttcaactcatcacccattggataagaagctaaaaatacaacgccttcaattaatttattatcacgtgcaaaatttgatgctgcaactcctcctaatgaatgacctcctattacccaatgttctatgttgttgtaagaatccataactttctgtgccttattagttccaagtatagctagattaagtggcatctttacgattacaacctcatatccactttctgctatttttcttgcaagtggagcataagattctatttctactttagctcctggatacaaaattaaacctttagaaacttttcttccttttggtgtaaatgaaatgttttcatttacagttacttcaactttactattgctgactagagcttcttttgccagcttttgaggttcatatgttttatttatccatatgaaaaagccaagcaaaatcaatacaaatagtatacctattcccttaaatatcttattctttatgttaaattttctattattatttttatcatctttgttctcaacctcatcataaagtaaaggtctctcaagttccatagttatactaaatgtatcatatttcttattacgctttacctttacatctttactcataaatctaacccccataatatttgaatactattatagtttatcctaagtaaattgttttttcaaccaatgaaaaaaatcaatattttaactattttcatataaaattcataaatatatgttttttgttttttatatattattttcttttagtattttataaaacaaatagccatatactttattttaaatatatggctattctataatttaatatctaagctgcttcttttattgaaactttagttatattacttattctatacatttctttgacaccatttagagtttgcagtaagtttagacatattatcttgtcacctagacttttagtatttacaatactctctaaaattacacttcttccttcatcatacttatctacattgtaatttgaaatataattagtatctctcaatattttttcaacatcttcatcttttattttatttttattaacatttatatatagattatacatattacttattagtaatttctgattttctaaaaaatcctcttgatgtttatctttatatatagcatttatcaacataagtctatcttcaataagtgatggtatcaataataaattttttatatagtaaacatcagctacattttctatagacttattgacttcatcaattatatttttaactattcctttatacatttctataacatgttgatagcctgttttagcatcatatggtaatataaacttatttactattaatgcaataattgctcctaatgctacatatgaaatcctgcttatggttaaaacatttgggtctcccataactactgctgaaccaagagctgaaacagttacacataccattaattttctataatcaactacataagagtttatataccctgctaaaagaactattaacgaccttaatgtactatcttttattattgaaaataatacaataaatattacagctcctataaatgtaccttctattctttttctagacctttgtatacaattttctgcgtaaggttgtgttaatgaaaagacagttaacattatccatcttccatctcttaaatggaaataatccataataaaacccgctacagctgtagctaaagcaatctttactgcataagaaaatcttatagaatttaaattaaagtttttcttatatattgatagtcgtttaaattcatgaggtatctttgattttctttcagctttcttttcgtctcttgattttacttttttataatctactaaaaactcatataaattttctaaaacactataaatttcttttaaatttatatttttagtatcctgagcaataacataatctctaaatcctaatatctctttatcagttatggtatctttattttctaaacacatcttaatatagtttatttctttcgttgctacaactagaacatctgatttactatttatgctactttcttctaaaatattttttatatcttcatcttcaaattctttactatcctttttgtatctttccatgattaaacttattctttctaatgaaaataaaatattcattatgtctatacctctaatactgatataaaagtcatcttttctattatcaaaaataaccattttcaaatttttagatatagaatttattctataattacagctatctatttttctcatactagatttaattatagaactatcatcattaatagtattttttaaaagactaattttttctaataattcatcacatatagatatcagttctttatctccgacatttttcatcctatttctattcataacaaattgagcaatcattattataactgctccaacagctaaagccgacaatctcataggaaattcactttttcctacaggtatacttaccataaatatatacattagaccaaaaggtacatatactgctctctttaagtcataactaaatacataccctattataaataatgctataaaatttaataaaactcctaaatacatattttgtactgcaaaaaatgatagtattcctaagattatatttattgctaaatacttcagtaaatttttaattggagaaatagttaaatctctttccaagagtgttagcatagctgttactatacctacacctataagtgtatttttacttccaaataaatatataaatatagaaataaatgctattataaaaataaacaactttgtttttgatattactagtttctttgtcatcatatcccccctaaaaatttcaacaagaccaattttatcatatttgttatcttattcaaaatgcgcttttttacggtaggactttaactttttttatatttagaactatataattcatatataaacgtattttttttatatataaccgatatattttcgtatgctcccatattttttttgtttcaaatattttttcaaaaatataaaaataactctctcaataatactaaaaatgtatttatcaagagagttataatttatacaataaatttaattaagcttttctttacctaatatataagttccaagacccataaataaagctcctccaacaatatttccaagtgttacagctactaaattataaatagctcctccaatagtaactgtacttattgttggtgaaaataatgaaacactataaattgtcatatttgctacactatgctcaaaacctgatgttataaaagcaaataaacataagaatatcataattatttttgcagtatcactattagttctaaacgaacacaacactgatacacatactagaatattacataaaatccctctaaagaaaagagctgtaaatggcatggatgctttactagctgctgtatttgcaaaaaattcagctacaggtcctttgtctactagaccagttcctacaaatataagacctaaaaccaaagctccgattaaattacctacccaactgtatgcccatattttagaagtatcttttatacttacacctttatttaacataccagcagacataaccatattgtttccagtaaataactctgttcccgtcattataaccaaacttagtgctattgcaaatgataaccccattactatcttagtcataggtgaacctgcatcagtcaaaagtcctcctatagtaaatatcaaaagtatacctatacctacataaagtcctgcaaacgcagaagataccaaatattttactttacttgtgtttaataaatttatcttatttatagctgcattagttaatttatccaaagtttctttatgcataattccctcttccttctattaaattttaatttattcaaatatatgttttactcaatttatagatatttaattccactccagtatatgttttcgtacattttagttatttctggaagctctacaccttcaagtgcccattttttaaattccataaatcctgttctatcaattatatatcctatatgttcttttcctcctggtgcatctttatctatatacttttctacatatctataagtattaagtattatctttattatgctgtcctcatctacccataaaagaaaatcttctgctagtctagggtttttctttcctgttctacccattatagctaatctatagtattttttctcatctctagtccatgcatttgttgggcaatttagtacacactctccacatcctatacacttatctttatctcttaccaccttattattttctgtttttaatgctccaacagatattttagaacatttttttacacatgctccacaatttacacatctatctttttcatatattggtaaagccataccaataattccaaagtcattcattctagcttttatacaatcatttggacaaccagttaaagccactttaaaatgtaaatcatttggaaatatagctttttctattcttttagcaaattcagttgtattatattgagcctttggacagactttatttcctatacaagctgctatatttcttgtacctgctgctggataacctgcgtttttctcactttgatttatattcattttttcaataacaggttgtataattttatttatttcttccatatcttccatatttattcctaatatttcaaacccctgtcttgtagttatgtgcacctgtccatttccgtactcacttgcaattttagaaactacagctaaactctcagggtcaataagaccaccaggtactctaactcttaaagaagtctcatattttgtttttgtaattctataagcatttttcattacttttttggtatttaaatctcttatcacaaacttcgccccctaatcaataagatttttagcatatgaataatcaaatactggtccatctaaacatatgtaagtatcatccattttacaatgtccacatttacctattccacaacacatttttctttcataagaaacccaaatgttcttttcatctaaatctctttttaaaaattcttctactgtaaatttcatcatcattggaggtccaactacaactatagaagtattgtttatatctttcatatccaattctggtatgtattttgttactaatcctacattaccactatatccttcctctgctccatctacagtaactaaaatatcaagttttttactccatctctttaaatcatctgcaaataaaatatcttttggtgatttaaatcctactattaatttaaacttttcgcatttttctttattattataaaaatattcaactattcctcttacaggggctaatgcacttcctcctgccactactacaatttctcttccttcataaagggatacatcaaatccatttccataaggacctcttataaaaaaagaatctccttctttataattaaacaactcgctagttacttttcctacatttcttattgtaaagtcaatataatcctctccatatcctgatactgatattggactttcaccgtatttaggtatagatatctcataaaactttccaggcaatacaccttttgtattgcagtttactctaaaagtccattctttatcagtatgtttaactatatctagtatttttgcacttactggtatatatgggttcatttatacttcctccttactaattactaaatcatttattttttctatacactttgaaaatgatatgtattgcggacaggcatcatcacatcttccacaaccaacacacatatgatatccgaatctttttttaaaatcatgtattttatgcatagttttaaatctcattctttcaccttgtttttttctaaaagaatttccacctgctatatctgtatatccatctacttgacaagaagcccaaacccttcttctctcacctacattttcgttttccttatagaaaatatcctgcattgtaaaacatgaacatgttggacatacaaaattacatctaccacatcctatacatcttgtatcatattcatcccatattgaatttcctataatttcatttgaatcaatattctctggcacatctacagatattaaattatcagttacataatcaacattaaattcagttgcttctccattaaatacttcaaattcactatcctttatatctaagtacagtgtatctccttctatatttaatccaattgaataattatcagttttgttagaatccatgctcacacaaaaacagtttctaaaactttccttacaccctacaagtgcaaactttactttatctctgatatttttataaaaataatctttttcttcaccattatttagatatatttcatcaagtctttttataccatttatgtcacaagctcttaagaaaattaaaattttcttgttgtctaaatcgctttccttaaactctttttcagtaaaataaaacaatacttgatttatgggaagtacaacttcttttggtgaaaagtttgctttcttagcaaattccatttcttcaaaagcgtttacctccttgtatcttataacatcagtatctgaaaaagtacctttaaatgggattaaaactggtgcaaatatcttgtagtctttttttagataattcagaccttcattgaacttagatgaatctaattttagtttcatttttatcacctttcttatattttagttttacttacttgctatcttgtttaaatcttaacactttattttctatgcttctgtgataattatcacagtttcaaaaataataaaaaaatattaatagagtttactaatctctgttaatatttttttattatctatattattcgatttcaaatctaatcacttagatacaatcattaaatacaataaaactattatctactcaattttttgaataataaagaatcttatttgcttttttatacaattcaatagggtaaaataaaaattaataaattagacaataaaaaagaatctataaatagattctcttaataatatttttatttaattaaaattctaataatacttttacttaatcataattaattatttttgaaataccttgataattcagtttctttaacataaaaacctttattatcaatcttaataagttcttctttttgcaatacctttatcattctggaaacagtctcccttttacagccaagcatatcagctaaatatgtaactgtaatatttacatttagtaaagtccattctccacagcaaactccaaattctctacttaacctatataattttgctgcaagttttttatctacttttatggatatagaatttttcaactgtctatataaacgtcttattcttctttccatataagaaataatatcctttgtaagttgaaaatcattttgcataatttctaaaaattcttcaatactataataagctacaattgaattttcaaatgcttcacagccaacagtggagtttttagaagagtcaaatgtaatatcatttatgacttccccactatttaatatgaaaattacttttctctctccattttcacttatcttaaaaatagatacctttccttctaaaagtatataaacactgtctaagctatctttttcataaaataaaatttcttttttttgtaatctttttagtttagctttttctttaagttgattcttcgttttagtacttaaattattaaaaattattactttatcaatattataatcttttaatttagacatgtaatatctctccattcctaaatttttaagagagctctataaaacattacaaatttcttattttattcatttttaaacaattttatagcatttgtagttttaattttcctttcaatagcttcattagaaagttcttttactacctgtgtatatactaaatcaataatgaaaaattgtgctaatttagaagatattgaaccagtttccagtactgtttctcctgatacataagataagtgtacatctgaaatatcctttaattcagaatttttattttcagtaattgatataattttagcattattggctcttgcaagctttacagtttttataatctcttctgtttcaccagaatgtgaaattgcaattattaaatctccttcttccattatggaagacatcattatcatcgtatgactgctatcaaaacttacacaattaaggcctattctcataaatttatagtttgaatcctgtgctattataccagaatatccaatgcctatgaagtaaactttctttgcatttattataagccttgcacagtcatgtacatccttactattgattatctctactgtgttctctaaagtggttacatttgaacttaaaagtttttttgctgtatccaaagctggctcatcattttgtatatttttatttataatattttttttattgatagttgatatttcttgtgctaaagtaactttaaaatcctgtaatccattaaaattcattttttttacaaacctagttatagttgcttcaccaatattgctctctttagctatttgtgatattggtttataaaatacatcatctatattttcttttatataagctattaataatttatctgattttgtgactttaaaagttggtgattccaattgttctaaaatactcattaaaaacccttctattctttatattttgtttaaaaaattatataatgctccaagcattcctgcatcattttgtctctttgcaaattctatattagtgtttttgtaaactctctctataagaacctcctttaatgctttgtctatttttggttttaggaacttttcttgtgccataatcccaccacctaaaattaccacttctggatttattacataacatatatttgcgattccaactgctaatgattttatcatattatcgagttcttttaaacaatcttcatcattattctttgctaaatcaaaaattatttttccatttaagtccttttcattcaaattttttatttttgctacttttttaattagactgctagtagatgccaattcttgaaaagaacttccatttatattcatatatcctacttcaccagcgctattactaaacccatttatcagtttattgtttattataatacatccaccaattccagtacctattgttaaacatatagaagatgttgcacctctacctgcgccaagccacacttcaccaagtccagcacaattaacatcattttcaacttcacattttatattaaactctttttctacttctttttttaattgcatacccttataatttggaattaattcttctaatgcaaatagtattttaccttcaactgggtcaaccatacctgcagttgatatacatataccacttatttcattttcctctatatatttttttactatatcttttattttggctaatattccttctccacctttttcctttgcttcagtatcaagacttgatttatcaattataaatccatcttctctaataaaaccatattttattgaagtacctccaacatctatacaaacgtaatttttcataacatatctccatacaaattatttttataaattaacaactctatttaaaattttatattacacaaatcttttacttatcttttccaattcacagatatatttccttgcttctgataagtctatagtatcacttaatacacttttttctttggttatatgatacttataaatatttttacataagtcctctcctaacatattaagaccttcttgagtgtaatgaacatcatcaatagttaatcctctgtcatgaaattgcatagcaattttacttcctacacacagtatatcacattcattacaagcagattcttgagctgctgcaattcgtcttgttctaataaaatattcatcttctccaagccaataaccagttaaacttacaaacattttatcaatcatacattcttctttaagcctatacgcaattttttttagactttctttatagtacaatgcatcactaccatattttgcatcactttcaccttgaatccaaataacgtatttattttctatattataatgtttacttaaggtagtacagcctgtattaaatttttctatagtgtcatttagaaaccagttattatcatgattccagttttttattcttgaaccatcttttgcattgtgaataaaacaaactttatttccagtaagcttattccattcatttgaaaatgcaggtgctatagtaccatcaccttctgaagtctctagctcacatctcatatttataatttcatcagtactcaaatattcaaaacaattttcatttggaatgatgctctcttttggatttcccaatcctctagcattgctttgtcctattaataagaatacatctatattttccataagttaactcctttacaaaattttaagcttttaattattttcaattttctcataaaaaactaaggctgaaaatagtaatctaactaaaatttacgaagtctcactaatcgctgaaagttaaatcactattttcagccctagtggttatataaattatcattatctaaccaaaaccttaaaaatagcttttttgatattttctttttctaaaacttttattcctgtcatatgagcatcttctggataacaaactaaaaaatcaccttttctaagttccatgtatccattatttttaccatcaagaggcaagaaatcgcccttttcttcatatattttttgttctaaattttctataaaatttatatctattcgttcacatccatcaagcatcaaatgaacatctatatacttcttatgagcttcccagaatctatcttctttttcacaagttttatactctacaatattcacaaaaatatcatcaccatctattgtataagtacctttttcataatctattaatgaattatctttagcatattcaaaacatctaagtaaatcttcatgcaatgttgaatatgtcttactatgatttatatttccaaatatcataagcactatctccctatataattataaagtctatttttatacttttatatacaaagtatattatacaatcttatagagtaactaaattatttatctaatcactctataagacaatttatcatttaaatattatttttcataataaacagtagtctcagcttttggtaaagatacttttgctttaactttagcttctattgcactaactattgtacctaccactacagaagtcgtgattgttattagagaatatgcccaagaagttacttctggcatacggtattttaaataaacaactaaaattgctgatactatgaatccaacatatgctcccattttagtcgcttttttacaaaatgcaccaagtacaaatattcctgctaaaacacctagtactagccccataaaactattaaaccattcatatgctgactttatttctccatttgctaatactattgcaacagctatagaaagtatacctacacctaatgatatatattgtgctatcttagtttgcttttccatacttatatcttttgttatgatagtttgtatatctaaagtccaacttgtagcaactgaattaagccctgtcgataaagttgattgagaagctgcatatatcgctgcaagtagtattcctgttatacccactggtaattcataagctatatatgatgcaaatacttggtcttgttgaactgtttgagctaaatctgggttttgagtatagtatataaataaacaagttccaattagataaaatactgttgcaagtcccattgataaaacaccatttccatatgtcattttattaagttgctttatatcagttgttgtagtaaatctttgaactatatcttgactcgatacatatgatgaaaaagtattaagaccagctccaataaatattataaatgcacttgtagatagtatatttttatcaaacataacttcattacttgctaagaacttgtgtccagttgtaagagtatccattactgttccaaaaccaccatttatacttgctattaaatagaacaatgtccctgtaacacctactattaataccataccttgtataaaatctgtccacaagacagcctttaatccacctgtatatgaataaattattgctattacacccataactactatcaatacatttacaggtattcctgtaagaccagctagaaccactgatggaagatacattatgatagacatacgtcctatttgatatattataaacatcaaagctccaagtactctaagacctttactttcgtatctcatttctaagtattcatatgctgtatctatttctaacctactatacagaggtaagaaaaattttattgtcaaaggtattgctataaacatacctaattgtgcaaaccacaaaatccaagtaccaccataagaatttcctgctaatgataaaaatgatattggacttaataatgtggcaaatattgatactgatgtaacccaccacggaatagttccatcacctttgaagaactcttttcccttcatttccttttttgaaaataacaatcctgcaaataaaactgccaataagtaaaccactagtattgcaaaatctatccaagtaaatcctaccatttgactaatcctcccatactaaaagtattttattaaaaatactttctgtatatttcttttgctcttgatttcatttcatcagttgcttctttcataggttgtctacagtatccagcctcaacaccttgttcttcaagtagtaatttaattgtttgatataagccatttcctaatatatctgttattaaatcattagtcacatgttgtacttcaagtgcttctgatattttttcattcttagttaattcgaatatttgtctagctctgacaccgtttacattgaatgtagaaccaattgccccatctacacctaaaactgtagctggtaacatcatttcatcaaatcctgcaaatattaatttatttgggaatgtttttctcattctctctaataagtagaaatctgctgctgtaaacttaacacctattattttttcattttcaaataattctccaaactggtctaaactcatatcaacaccagttaaaaatggtatagagtatattattaatctattatctacagaatttattattgtattataatagtgttttatttcttcaaaatcaaatttatagtaaaaaggtgtaacagcacttattgcatcatatcctaaatcagttgtaaatttagcaagttctacagcttcttttaaattaactgaaccaacttgagctattaattttatttcttctttcacttcatctttagctatttcaaatattcttttcttttcatcagttgaaagcatgaagttttcccctgtacttcctcctacataaagaccatctactttacaaacatctatattgtgtctaattatttgtcttaaccctttttcatttatattcccttccttatcaaatgaaactaataatgctgaataaattcccttcatatctgttgttctcatatctttacctccaattttaattttcaagtatagttaaatataataattttttaatttataaattaatttttaattaatttcaattgctttaacaaatttttctgttattaattgtggtcttgttattgctgaacctactactgatgaatgaacacccaactcaaagaccttttttaaatcttgaggagtatttacctttccttcagctattacaggtatttctaaatctttaactaatctttccattaatacaaaatctggaccttctaatgttttagtatatggagtatatccagatagtgtagttgaaacgcaatctacaccgtactcttgtgctttgatagcctcatcataatttgaaatgtctgccattactagaacaccgttttcttttatatactttataagttcttttaagtcttcattatttggtctaactctattggtagcatctaatgctatcatttcacaccctgttgttaaaagttcatcaacttcttttttagttggcgttatatatatatctgaatcttcatagtttctctttataatacctataacaggaagtccagtaactttttttatttcaataatatcttcaactccttgagctctaattccaacagctccaccttccatagcagccttagccattctccccattataaaaggactatgaagaggttcattttctaaagcttggcatgatactattaatcttccctttaccttatctagcattttttaaattacctcgtttctgaaatttattttcttgatttatgtattaataataacatgaaaactttttctttgcaatattttttcatatttttttctcgcatctatatttttactgatttattttatatattagcttgttttttacatttaaaagaaattttatttcatttttttggtgtttattttcattttatataactactgttataagtccatttaaataatttcaataaaaaaacccatgtatactatacataggtttcccaatattattctaaatccattataatttttcttccacagcatggacaaaattcagcctctgtatctatctcactttcacaataaccacaaattataaaatcatcacattcattttccaattcaaattttttaccacattcagcacaatatttatcatttacatttccaacataaccacactcacaagttacattactttctgccatttccatttcattaatttccatatttttttcataaattaacttatcaagttctagtaactcatcacagaatttatcaaaactattatcattaatagaatcttctctaattttttgatatgtcagtattcccatttccaagaatatctttgctttcttttcttgaatatcatcaatctctctatttaattttgatttttctttatataattcaactttaaattttccactaccaaactttttcttaaccttagaaaatttatcatctactttattattagtatttccttccacagaaattccctccaatcatatttaatcagctgaatttagcttatatcctattaaagatatcacaaaactatatacaaatgaaattacaatagcttgtaagactttaaattgcattattaaagttgttccataattagttgtattaaagaaattaatattactatctagtataaatgtactaaataaagccaatattcccatcaaaaatgcataatatatactaaatactattataggtcttatactatctgtattatacttaaatcttagcttgtatccatttaataataatattaacatagacaatgctcccattgcataaaacattaatttagtatctccaaataaagatgaagaacttaaagtaaacattgatactgttgagtttattatggttactgaaattccatttgcaaaagcccacatataactagctatttgtgggagtatagtaaataaatttaatccatttgaataactactcatatctagttcatttaagtaactactatcagatatagttagtaccaatagtattactaatactaaaacataacctaatatgaatgttcttatagaatttgaaaaaagagataaatacatattttccttttcataactttttttataagtagttatgtatgtacatataaaccctaatacaaatccatttaaaagaacactaaaaaattcataactatattctaatgcatatccatattctaacatactatgtgaactagtttttacattagtaaaaatagataaaatagctaaaactaatccataaaaaattccaactcctagagaatttgctaatacagtttttgaatctctacatctttttctcataaaaattaggtttgatattaataataccaaaatagggattataagtaatatcaacaaacctatattggcatttataaacccagaacccatcatggtagacatagatacactaatttgacccaagttgagagctaggattatatgtgctggatttattaaataactaatatcattaaattgaatagttataatagctttaaatatcaatgcaataataaacaatataaatatggttgtaaatgttgttaaaaatacacctcttttatttgcatgatatgaaagctcttttattttagatttcaagtctagttttgtttcaagtggtcttaatgatgctatttcataaagttcatttccacaaaatttacagtaattatccttagtattattttctttattgcaactagaacaaattttttcttctttacttttaagagtgatatggctattttttatttttctagttggttcacctgtctttttggaataattattatgtgaataattcatattatttattttcttttcacccattttttccctccaagttttactattgtaaattatcaaatataactatatcatataaaacttaattataccttaattggatatatttatctattttatttgtttattgctgttgttttttaacaggtcttgatatttaaatagtttgttaatgcgaactttattatttatattttattatgcttaatttaaatttattctattctttattttcagcagcaaactatctgtaaatcttaattatagtaaagtattaattaataaagttactcaacattagctaataaattttatctatcacaattttagattgttacacacaatatattttgatataattaaatcataaacgaagtattccaaatatctaatgatagaaaggaatacttatttttatgctttatttttaatggaggcttatatgaacttagaaaaaataaaaaaattttttggatttcctctagacaaaaaacacaaagaaaatgttgaaaaagaactctgcaattatctttatcatacgggtaaaatcatttgcataataatagtaatatctcaaataattatgatgatatcaatctcagctagagaaggaggcccttttgccacaccaagacgccaatggtatttttatatgtatgtaacactattttgtgtatcttctgtctttatgtttgtattttcttatctttggaataaaaaaaaggattgttgtacgttttatataaatttatggataatttatgtgacttttttctgcctatggggttgtgtaattactctacttgaccagttaggtggaaatgacctaagtgtatttagttatattatgttagcagctgcagctttctcagtattaaaatttggagaatcagtaatagtttttggaggatgctttttgtttcttaatttattcttacctgggattcaaactataccaggcaatgagtttagtaatattgtcaacacattttttataacatcccttgccatttttgtttctacaatgctatatagaaatcgtgtatttacttactatgataaacttttaattagtcaacaatatgaagaaatatctcatataaataatttacttaacgacaaagttatgacagacgaccttactaaaatgaacaaccgtagataccttgaagatattctacaaaaaaaattaatcagccatgcaaatcaagaacctataactggaatgatgatagatatagattatttcaaacaatttaatgataattatggacatcaaaagggagactattgtctacaaaatattgccaaagtaattttagattttacaagttctgaaaatgaacatgctatacgatatggtggtgaggaattttttatatgtatttttaactgtgatgagacagatgctaaacttaaatcagaatgtttacgaaaaattatagagtcctgcaattttgagcgtgatgatgttcctttaaaatgtgtaactgttagtattggagtttatacaaagaaaattgaaaaggcaataacattaaatgagtttataagtaattgtgataaggctctatatactgcaaaagaacagggacgtaattgtgttgcattttattaaaaagttacatactattatataaacctataagtattatatcgcaaaataaaagtaatcaaattatatatttatagtacaataaaaataacttgcatatctctaaaatagataaatatgcaagtcattttagtgtttatacttaaagttatataagttttattatatataattattaaaattcagcatttttaggagttcttgggaaaggtataacgtctcttatgttagacatacctgtcatatacataattattctttcaaatccaagaccaaatccagagtgagtagcagtaccaaactttctaagttctaaataccaccaataatcttcttctcttaatcccatttcattaattctatctaacaatacatcttctctttcttctctttgagaacctcctacgatttctccaactccaggaactaataaatccattgctctaacagttttaccgtcttcattcattctcatatagaaagcttttatatcttttggataatctgtaacaaacactggacaattatatatttgctccgttatatatctttcatgctcagtttgaaggtcacatccccactcaacaggatactcaaattcatgaccagattcaattaataattccactgctttagtatacgttattctaataaactcagagtttactatcttatttaatctttctaacaatcctttatctataaaactattaaaaaattccatttcttcaggagcattttctaatacatagcttataacatattttatcatatcttctgcaagttccatgttatcttcaaggtctgcaaaaactatttctggctctatcatccaaaattctgaagcatgtcttcctgtataagagttttcagctctaaatgtaggtccaaaagtataaacgtttctaaaagaaagtgccattatctcggcatttagttgaccactaactgttaaattagcctcttttccaaagaaatcttgagtatagtctattttaccatcttcagtttttggaatatcatttaaatccatagttgttattctaaacatttctcctgcaccttcacagtcactacccgttatgattggagaatgtgcatatacaaagtttctttcttggaagaatttgtgtattgcataggcagctattgatcttactctaaatacagctgaaaaagtattacttcttggtcttaaatgtgctatcgttcttaaatattcaagcgtatgtctcttcttttgtagtggatacgaactatctgattccccttctacaactatgctttttgcatgtatttcgactggttgtttagccccttctgtagatactaactctccctctacaagtatagatgagcttattgctaattttcctacctctttaaaattttctactttctcatcaaatactatctgcatatttttaaagaagcttccatcatttagctctataaatccaaaatttttagatactctagatgttcttatccatccagctacttttacagtcttccctatgtactgttctttttctctgtacaattcttttactgttataaattccttttgcattttaaatcctcctagtataattgttattaatttcttttaaatataatttcaataaaaaaagcccttcatccctatataaagggacgaaagactattactctcgcggtaccaccctagttgtcataatgacctcttagttaagcaatgcttaaagcctataacggtgccttccgtctaagtctacttactaaataagctttcgattagaaactccaagatgttcttcaatataaacctcgtattgagctttcaccatcctcaactcgctagaactacattttatatctactcttctcttcacagtatttatcttttattatttctactaattaacaaaattataccaatttataaatttttagtcaataaatttatataattgatactgattgttatttaaaatataataattctaccttgcataatgataataaatacttatcttcattacttctttattacttaaatttccaaaattttataatttacttccattgtcaacccagtcttttgcttcttcgacacccttaattgaaggtattgaaactttactatgaggttttaatttttcaacatcagcccatgctgctgtcgactcatttccaactaaaagtgaacttttaagtcttttattatctttaccttttaatgctcttgcctttttactttccaaaactatcacctctattatttattttgtaatagttttagcaattttacaaataaaattcataagtctaaattataatgatttttaaattaacatcatatcttttcaatacttaatttatacctatttatatacaaaatatttactttgtgtattcaaaatataaaactgtttttttaattttcatatttattttttatgccatttttctactctatctaaagtatttgatacaattaaattactaatcaattataattttacataggttcttatctatagagtatttgctatctgttgaatcgtattttttaaatttaaaatcccatatccctgcgatacatttggatatgtatatatctcaagttttgtagcacccaatattaaatatgtttttaaaacttgtgtaaacaatgataatctcggtacattatcctgtttttctaagtattccatcaataaggctaaaacacctgtgactatagaactgctcactcctgttcctgttcctgtattatatgttccatttttatatgtggatattatatctacacctgaagctactatatctggcttaattcctcttcctctaattggtcctttcgaagaaccaatccacatactatcagtcttattattaaatgtaccaactgtaattacatcatcactagcagcatacatagttatagtagctactgaatcagggtctaaaaaccttgtgtctggagctatcaaatttttatttggtaagtatatgtcatattctccacttattataagttctgaagtcaatcttaaaatccatactccaggttttatatctcttaatcttatctccaaattttcttttccagaggtaatatatggataaataaatctcattgcataagtagtattttctaagttaaattttcctctatatatataaaagtctggagaataccttatatcatgactaacttcacctgaaggagatattatctgtgctcccactttatctggaccattcgtatttagtgttatatcaagagcatagtcatctccatcttgtattattacatcttgaacttctcccacactgctaaatctgccagaataatgaatatctgtattcccttgatttcctgcaccactcactactaccacaccagcactactcaatatattaaaagtatctaatattgaagtagttgctacagcacttgacttaactccaatagtcaaatttattattagtggtttattttctgttcttgctatattagtaacatacgttatagctgctaaaaaatctgaaacactataatttatccttccagcataataagtatctgtatatgattttaatttaactactattaagtctgattctgtagtaatacctctatactgcgaatttatccttccatttccagctaatataccagaaactaaagttccagtacctatattatcttgactcaaacttccatcatttctatttatggctatatttaactgacttcttgtaaattcacttccaaaaataaaaccttctggaggtggatttgtatttgcttcttggtcccataaatatagaactttactagttccatcatcatttataaaatcaggatgcaaataatctataccagaatctataactgctaataaaattcctcttcctgttatatcattatatggattttcataaatataatcagtttcagctgctgttgtaatggtttctccattatttacattattagttatttcaattagactgctcattggttcagattcttcccaccaagcaacttgtattatattatttaaaatagtttcatcaaaatctacaggtacatatattactgcaagctgactatttaaaaccatatacctatttattccattttcttgtagggcagattctatatcaccttgataaattatacaataagatttttccataaatccctcctatcttaaaacatcaaacattcctctaacatccaaaagcccatatccagaatttgtatttggatatactgtgtttgaatcttttctagcaccagcttgcataaaagtttttattttttgcacatatgcttggtttggatatctaccatcaacaaaagtatattggaaatacattgcagcagcaccagctgcatgtgcacttgctgctgctgtaccagttatagttgcatacgtgttcccaggataagcagctattatattgacacctggtgctactatatctggttttaacctgtcttcaatagttggtcctcttgatgaactttgccataaactaccattaatagtattgtaggctcctacagttattaaatcatcttgaatagcaggataatttatagtgtaaaaagggtctacctctctaaatctagttccactttttaaaagttctctatttggaaggtataagttatatcttcctgttataatataaacccctactaatcgaatcttccatacacctctttttgcattctttaaagtaacattagtaaattgctgcccagaaaaagttgttgggtatatatacgttatagaatattcagtcccctctaaatcaaataaacctgttactttattataatttgaaattccaacacttttactttcttcaccagtgggagatactattattacatcagctttatctggtctatttaaccaaagttctaatgataattcttcctcgtcttcatttaactctaattcaacttcaacagaacctccaacatgtggtattattccagatgtatgtgtctgtgtattgccctcatttcctgctcctgctgttatacataaccctctagtaaagaatgctttttcactattgctcctattggttaaacctgccaagctactggtacctaaagacatatttataactagtggtcttctaagttcaaaagcttttttatatgcatactgagatgcagcaaacaacattgcactattataaaaaccatctatcttaccgagttttattattattagctcagaatcttctgctatacctgcatattcactatttacatttccaagccctgagcatataccactcaacatagttccttgaccaacttcatcctgagatagactagggtcattttctgcgatagctcgatttatatcttctcgtgtatattctgtcccaatataaaaaccatcaggtggagttccttcttttgtttggtcccataaatatactatttttgaagtaccatctggataaataaaatctggatgtagatagtctattcctgtatctgcaattgatattagagtccctcttcctgttatattaatattaggattatttttaaagaaatttacgcccatttcttctgttgcaactacacctccaaaagtacctcgattaatttctccaagtaatgtcatctttgtagtcgatacagttcttatgattgaaggaagttgcaaaactcgttgtatactactatagtctgtattatttatagatagtacacctaatgaatcacttatcttaaaaaaattttgactcatacctaacccagctagttcttcttcaaattcgggagtatggactacatctattcctgatagtattcctgattgtctacttgcatttttacttatataaatttcattctctaagtcattatgtatttgtatattataaccatctataaacttatacctattttcctcatctttaaatgacttattaatacttctatatccaatatcctccgtttctaaatcttgatttatactagatagagtgtacaaatctatatctgataaatttaaaaaaccaaatcctgatgaattatttggataagattgattacttaatctccttgctccctttaaaagtaatgcccttaatttctgtgaatacaaaaataaatcatttccatttacaattccccattccataaacaatgaacaaacccctgtaacatgaggtgtagccatgctagttccagttaatgctccacttgtacctcctggtaaaaaagatattatatcttcacctggagctaataaatcaggtttaaaaacacctaattgtgtatctccttcaccagaaaatatagatactatgtctgttcttgaattaaaactacctactgttacaactctacttgctgttccaggaactgttacagtaagctcttgagtaggaatcagaaatctagtatttctatttagtccttcagaagttggcaaatatatatttacattaccagttactatatctattggttcaaatacaattttccataacccaggagttatctgtgtatttgaacttaattgtagagtaactcttcttgtaagagagtacggtgctatagggtaaaaataaccagttattctagtttcacccaaagtatttcttatctcacctgaagttagagagattgcttgtgtttgattgtttgatgggtttaccaaatgtacactaaaatcatcaacaaaatctggccatatatttatgtttaatatacgctctccttccccaactataaactcaacttcttctgtaatattattttgaagcctaatccttttatgacctcctttatctgcattatttccagctgctacaactatattgtttttccaaaataaacacatatcatctatatattgttcaaataaagatgttcctctatgtgaaccttcattacttccataacttatatttaatgtaacaggcattcttaattctaatgccctatctaaaataaatttaattgccctcataaactctgtacttctcgaaaaaatatcggtctgtatatttccaactctaaccactattattctggcatcacttgcaatagttgcacaaatacctgcaacatgtgtcccatgtaaactagttgttgaaataggtatatacatacttccatctattgcattatttatatcttcattagtatataatgttccttctctaaaaccttctggtggatttccttgaatagattggtcccaataatataatatcttagacctcccatcactatctctaaacacaggtagagtataatctattcccgaatcaattataccaattatagttccctttccagttaaaccagttctatttttaaaccccgttattcctgtacttgaaaaactttgcacatcctgagtctgtaatataaaaggcttttctataaattcaatttctggataagttaaaagtgtatttacatcttcttcattacttgatgttattattgcatatgatgaattaagtatctctactgatacacctaattcttcttctaatctcaatatatctccattgtattttacaattaattcataatttattataatcacctcgacttctaaaattattattaatgtatatgttttgtgtaagtctaaaatgtattagactatataattttttaagtttcagttatacaatttataatagatatattaaaaaataaataatgatggtacaattttgaataaatcataccatcatttatatttactttatcttgaaagcattaaatttttcaatgctttttcaagaccttttacagtcagtggaaacatattaaattcactttgtatcattctttgagtttggtaccaataattaattgaatcccatccatctctaagttctggattcatccatacaattttactgtactttctcttaaaccttttaagccattctataccaggtgtgtaattatatggaccacgatagttaccaccaatatgaagtaactcagaaggcgacatagaagcatctccaacaattataactttatagtttttatctatattttttaatatccattcagtattaatagatttacttaaccaacattcaggtgttgtaaataatctatcataaatacagttatggaaataatatatctttacatctttaaaatgatttgatttacttacagactgaaataatgtattacataaagtgctataccccctcattgaaccacctgaatccataagcaataaaagcttcactgtattttttcttggcttctcaaaaaataactttaaatatcctgcattattacaagtctcttcaatagtcttatccaaatcaagctctgtctttggagcatctattctagtagaaaattgacgaagtctctttagtgcaacttgaaattgacgcatatttaaaacttcatcatctctaaaatctctgtattttctttctcctgcaacttcaagaacagctctaccataagtagaatttccacctatacgtataccagtttgcccttttcctgaatgtcctaactcggaagtgcctcctgtgcctatccaataattaccaccattatgaggagagtcttgttcttttattcgttcctccaatttagctcttaatttatcaagatttatatttggattttgttccaatctttcaaactcttctaaatctatatctggttttttaagccaattcataatctcttctggaatttcttcttggtgttctatacctttaaaatactccaaaaacactgcatcaaacttatcaaaatcactttcactttttattaaaatcatcctgcaaagatagtaaaaatttgaaaagtttgaatagcacagccctttatccaatgcttcaattaaagtcatccattcatttaaagatatatttaatcctcttgacctcaataaataaaaaaattcaataaacataattatccagctcctattaactataagtgtctttgcatagattcaatatcctcattattcttaagtagtattcctgcaaaaggaacttctttttctattttttcaataggcattccactcaaagttaatgcttgtatccagtctattaactctgatgtactaggctttttttgtatgtcctttaaacttctaatccaataaaaagtagtcattacttgttccaataggtgttcttctactttatcaaaatgtactttaactatttcttccatcatgtctctatcaggaaattctatataatgaaatatacatcttcttaaaaaagcatctggaagttctttttccgcatttgaagttataataactattggtctttgtttagctcttacagtttcttttgtctcatttatgtaaaactccattttatccaattcccaaagcaagtcatttggaaattctaaatccgccttatctatttcatctattaaaagaattacttgttgatttgagctaaaggcctctcctagtttaccatattttatgtacttgctaatatcatctacaccttctcctccaaattggctatcataaagtctttgaacagtatcatatacataaagcccttcttgtgcttttgtagttgattttatattccaaattactaaatctttttttaattcatttgaaattgcttgtgctagcatagttttacctgttccaggttcgcccttaatcaaaagtggcttttcaagagcaatagcaacattaactgatgccatcaattctggtgatactacataatcactacttcctctaaagttagatatctctttttttatcataaatcctactccttttaaacagtattttctaaatgtatatagactttattactatttttgatataaaaataataatacaatacatttgtatagtattattctaaaattctatatctaaataaaatcacctctaaaatatttaatttttatctttatttgtcataattaaatgaaatatatattttaaagaataataaaagatagcttattgtacaaaatttaaattataaaaacttagtttaatcaaaggcaccactttttttcattttagattatatataaacataatataaataatttttattattttagctataagcataaagttttaacgtatttataatttcatattaatcatactatattaatactgctttttattgtataataagctataaatattaactttaacttagatttaagtatatctaaatttaataaatataagaaaggttgtgttattttgcaagataaaaaaatttatctaaatattgtactcactgtagttgtttcatatatcttgattaaagttattgataattacaaatatttttttggagtgataagtttattaatgtcactactaacaccatttataatagcatttgtattagcatatatattcaacccactagtaaagttcttagaaagtaaattaaattttaagagaatatattcgttacttcttacttatggtgtactcatagttatactaatttcctttatattatttacagttccatccatagtaaatagtttagctgatttagttgctcaaattcctacatacatagataaaacagagcagttcttattcgacttaggtaagagtttacaatcagttgaccctaatacattaaaagagtatggtgacaaaattatgagtgtaatgcctaaatttagtaacttgcttattggttcacttggtgggatatttagcactacattttcagttggaaaatttatagtacaatttcttttaggttttataatttgtttctatatattattagaaaaagaaaaattcttactgtttacaaaaaaagtagtttatatttccctaggtaaaaaatatggagactttataatagaactatgtcaaagcttaaatttaaatattggtaaatactttacaggtaagattttagattcttttatagttggagtactttctggaattggtctttactttttaaaatctgaatatgcactattatttggtacacttatgggtgtcatgaatatggttccatattttggtccagtaataggtatggcaccagttgtaataattaatttattctccaatccaacaattgctttaacttctttaatttacttaataataattcaacaagttgaagttacatttatagagccaaaaatcgtaggtggacaactaggtcttagcccattctttacaatcctagcagttactgttggtggaggattctttggtatacctggtatgattctatctgctcctgtgatgggcgttataaagatatacttctgtgagtttgtaaatcgtagacatgataaaatacaaatggaataaaaatacaatttaattacgattttgtaatcaaaagttacagctgtgtaactgtaatattattctctttaatggtaatatttaattataggaaacatacaatattattaagtaatgaatcttatataattaaacatgaaagagggttttagtatgaaaaaagcacttatatctttattagttttatcttgtttgttattaactgcaccagtaaatgaatcttcttatgcagattctcaaaagaatgttcctgtaagccaaaatactaaattgactcaagaacaagctaaagaacttttagtaaaatacaacaatgaagttgattacatatatcaaggaaatgctagtgattttgaagcattaaaagctaaaaatcttaatggttatgtatttttaccagatgcagatggtgatattggttactttgtaaatgaaaatacttctgagatatattacttccacccaagtggatatcttgaattagttaatcaacaacaaaataataaataactaataaaaaatggatgcaaattgatataaatttgacatccattttctttttattttaaagttgtttctttttataaactttaaatacttttttaatcctgtgcttgctcttttataagtttctttatatctacagcaggttcatcttccatttttataacttttccttcccatgttctaagcataacgtaatctgttccttttgatacaaggtattgcggaagcaaaggagtctttcctcctccttttggcgcatttactatatatgttggtatagccattcctgatgtatatcctcttaaatactccatgatttcaagaccatcatctactgatgtattgaaatgttttgttccctttacatgtttactttggaatatataataaggttttactcttatttttagtaattcttgatttaaacatctcattacaaatttatcattatttattccatttaataatactgcctgatttcctaatggaactcctgcatttgctaacttttcacaagcttctttagattccttagttatttccattggatgattaaaatgagtatttatatatacagggtgatatttttttagcatattgcaaaattcatctgtaattctttgtggcattgtaacaagagtcctagtacctaatctaacataatcaacatgtggtatctctttaagttggctaagaatccactctaaataatcatcttttaatgtaagagcatctccaccagttactagtacatctcttatttcttcattttctctgatatagtctatagattcttggataatagcttttgacttatgagaatcttgttgtccaatatttcttcttctctgacagtgtctacaatacatagcacactcatttgttacatttattattaatctatctgggtatcttctagttatacatcctgctgggtttgtatactcttctcccattgggtccaaatcttcttgctcatcttccaactctatatgtgttggtatagacagtaattttattgggtcacatatatcttctgggtctataagactcaaataatatggagatattgcccatctaaattgagtaccaacctcttttatatattctttttcttttttagttagagttataatttttgataaagtatctacatctgttattctatttgataattgccatttgtagttattccaatcctcttcagttccatttaagatacttaatattttctgttttcgtttatttatctcttcttctttttcaagacctctgttaatcgtttttctagcctgaatataatcatcaatttttgattttaattcagcagctctctctaaggatattctagtttgttcattcataattttttgctatcaaagttaactacttgtattatttgatagcgtcctcctttctgatgtgtttatatcattctgataggcagatttaattttgccatatagattttataacaaatgaaattgaattaatttttgcattttttctgttatttcgcacatttatgaatatttttcaaccttcgtcaataaattacaataaattatgcattttttttaacaaatgattaattttttctatttttaagaattattttaccataaaacgattatattttcaagattattaaaattaaattttttaataaaaagtaaagtatttcattaaataataaaagcggaggtttattataataaatttctccgcctttttatttatttaattaaataatagtaaaataaatttaactcttaagaagtgactttattatattaagccctttttctaattcttctacatcttttggagctgttacacaaatacgaactgcttttggaactgtagagtttcctactgaaaatcgttcagcacaatatacttgaactcctagattttttgcagaaatttcaaatgattttccatccaattcatcaggaagaagtaaccaacgaaaactgcaattcttatcaccaatcaaattataatctgacaaaactttatcagcaacttcatttctttctataattgcatctcttttctcttctataattttatctataataggagaatataataaacgatgtactatttctgctgtaaatggagaaaccattagattcatattatatagtgcattttctaaattttctatatatcgttttggagcaactacaaatgctactctaagaccagcacataaaaatttagatgtactaaaaatatatatagtattatcactagctaaagaaaatatgggagtttgtataccgtctctaaaaatgctatttatagcatcttcaataattattatattatattgctttgctatcttggctatctttttacgagataaatcagacatagtatgtgtcgttggattatgataatctggtataagatatatgccttttatattttcatttttacaataactttcaagatattcaatcgatatttcattattttcttgaggaattgggactaattgaatacctatcattttagctattgacttaattccagaaaaacttaaagaatctgtagcaattctatcaccagctttaaataatcctagtaaagttgcacatatagcattttgccctcctgtagataataatatattttcttcactggtgtatacattatttctttctatccattttgcaattgactttttttgcatatatgtgccagatggagacatgtattgtaaaaacctatccatttctggttgttttagtacatttttaataaagtcaataatatatgtattttgctcatatggaggatgaactgtccctaattcaattatgtcttttgattccgtttgatataataatgtattacttacatttacatcagaagaaatgaatgttccctttcccacttttgcacatattagtcccttttcttcgcaaagtttaaatgctcgtgttattgtacttaagtttaaatctagaaaatctgctaattcccgttgtggaggcagtttatctccaggatttaaatttcctcttttaatatcttcttctaataacattgctaaagttttatatattggtggttttcggttatctaattttggtttccatgtcataggatagttttcaaaagaatttattggcatataattactcctcttaattataattgtactccatacaattttattattgtatgcttctattttagatgctatacttgtatttgtaaatagctatttcaaaataaataaataagagaggtataatatgaagactataggcttaattggtggtatgagttgggaaagtaccattacatattatcaagttattaatacagtaataaaagaaagattaggtggactacactcttctaaatgtatactttacagtgtagattttcaagaaattgaagaatgccaatctagtggaaattgggaaaaaagcgccaaaattttagctgatgctgcaattaaattacaagaggcaggggcagattttattgttatctgtactaatactatgcataaggtatcagataaaatacaagaaagtatacatattccattacttcacatagcagatgtaactgctacagtattaagggaaaaagaaataaaaaaagtggccttattaggtactaaatatacaatggaacaagatttttataaaaatgtaattattaataatggaattgaagtcttaattccaaatgaagaagaccgtataatagtaaatgacacaatatttaacgaactttgcttaggaattatatctgaatcttcaaaaaaagctttcttatctattatagataagcttggcaaacaaggtgcagagggtgttatattaggatgtacagaaataggtcttttaattaaacaaaatgacacttctattccactatttgatacgacagtaatacatgcaatagaagccgcactaagttcaatttaagacaatattgattaataaaaaaaatatctatagatttgtgtaaataagactttttataatttatattactagagattttaaacctatatattgtaacaaaaaaaggatagtataattaccctatactatcctttttcttaatttaatatttaaataaactcaacactttcaatttgtatacaaatctatcttacatttataacatcactattttgagagctatttccattataatttgcaacaacataaatatctagatttaaatctccttcaggaatacttatagtatgctcatttccctgtatatcactttgatatagattaaattctccatctccattagtattattttttacatatatactgtaagtacagtccttatgagatatactactccagttaactctaatgacattattatctctatcaacattagctgatatattttctaccctcatatctttaatattattatcattatttgaatttccatttccattagtaatatttattacattacttggcttagttgtatctgaatcctttttccctatgacataaatatcaaaatctatattttgattacccttcatatctacttctatagttgcatataccttgttagacttacctaaatcactttcatttatagttatagatttaattttcttaaatgattctcctgacaacttatctttaagatatatatcataatcaaagacatctttcatataatcccattcaagtttaataataactttattgtttactattttatgtgaaccaaccaagttttgtatatagtcattcgttatagtttctttgactactgttactgttattactttagatttatctccacaagttattctcaccctatctttaccttctctaagacctacaacatttccattactacttaaacttattgctctttctacaggtaattttgaatctactaactcataatatatttttggtggttctaaaccaggtggagaagttattatatctggtttcaatttttcattttggtcaacttctatttttatatcatccatatttatttcagcaactctagcttgaatcctaaatgttctctcaatttctttatttccacacttagcatatattgtagctttaccaactccaactgcacttactttatttcctttgatttttaaaatattttcattgctactcttataaactggcttatatgattttttaaacttatcataatcaacttctattgtactttctatagtagcactatcaccaacatgttttaaatccccattaatctccatatctagtgattctacctctgggtctactacttttatagtagccttttttaatactcttgaatttttcatgatacccacagaagaatacccaacctttaatgctgtcattttatttccatctatttttaaagtccctgagttatccaatacattaaaccaaatatttggatttttagcatacgaaggaaccttaatatattcacctgtagacaaagtaactgtttcatttaattttactacatatttatctatatctttaacatattccccatctacaatttcaatttctactccctttaccattggtctaagtattccaaatttaaaaaggtagtactgcgcaacaagcaatataggaatagatataattatggcaatttttctgtatttcttattttttacaaatatcatctatccacttccttttagcctaatatataatcatttgttttgtaagcaatctacctaagttaaatattgggataaactggaaaattattatatttcagaatatccctatactaattataaaccataaatttaaaatttaaaactaaaattaatgttaatttcttactattacaatagtctaattttagtgaaataacatttgtcttgtcagctgaaaagttatataattaattaaaaagaaattatacttatattatatgaggaggattttaaattggaaatcaattataaaaaaagaaatttcaaatcatttgctaaaagaaaaaatattgaaatttctgttcaaaggtatcttattgacgcactaagttatatggcacttggtcttttttcgtcccttttaattggaacaattttcaatacattaggagataatttcaatatttctctttttactgaagttataagccctcttgctaaacaggttactggtccagctatagcagtggctattgcgtatggacttcaagcacctccacttgtactattttcttgtgcacttgttggagcttgtggtaatgaattaggaggacctgttggagcatttgtcgctacactttttgctgtagaggttggaaaattagtttcaaaagaaacaaaaatagatatattggttacacctgctgtgacaatactaattggagtacttgtagctgaacttattggtccagctgtttctgcttttatgacttcatttggaaatataataatgcaagctacaactatgcaacctataataatgggagctttagtctctgcacttgttggaatagctcttacattacctataagtagtgcagctatttgtatgatgttaagtttaggtggtcttgctggtggtgcagcaactgtaggttgttgttgccaaatggtaggctttgctgttatgagctttagagaaaatagagttggtggccttgtggcacaaggtcttgggacatctatgttgcaagtacctaatataataaaaaattggaaaatttggataccacctactgtagcttcaatattacttggaccattatctacaacaatattcaaaatggagaatattcctattggttctggtatgggtacttgtggattggttggacaatttggaacagtaactgctatgcaaagtgctggaaaaggaggtatatctatgtgggttggtatacttttacttaattttatacttcctgctattgtaactttgttgatttcagaatttatgagaaaaaaaggtctaataaaacctgaagatttaaaactagatgtataaattaaaaactactccttttacttatataaaagtaaggagtagttttttttatgaaaattccaacattttttttaatagccaatccatagaacctttaacttcattccaaaccactatgttttcatcatagtaatagacagcttctgccttttcttcctctgtaacaaattctctaccaaaagcatttcgccaatctaacaaatataatccaacgtacttatttttacttctagcaaccttaatagaatcatttgccaaaaacatacttttatttttaaagtaataaagagctttactgtacatccatgtagcagatttttcttctttataaagttcaaataatttatttattgaagttctatcatttaatctaattaatacatttaataatttgtatcttattccctgctcatcactaggattaatttctattaaatattctaatacttttttggactcctttagattattaatactttctaactttctagcaagggattcaagtgctatcatataggctctggtagataaacctttccaaaatccaagttctttatcttctttagtaatcatacttttacctatatttacagcttcctccatatatctaattgattcaatatcactattcgcatcttgtgatagcttaatatatcttttatatagtatttttttcttttctaaatctaaatctacagactttgatttggaattggtctcttttacccaaaattctacattagaaatagctatagtatcttgatttaaaaagtcaatactacaaacatcttttattaaagacgatttattatttatagtatttaaagaaacacctatttgttttgaaaactctttttttgttatatgtagtggatgcttcttattgtataaaagattttgttctaaaactatatttagtatagctgaagaccatatatcagctctagaagaatgaattatctctttattattatctaaaaggttttgcaaaattttaaagcttatatctttgtattcttgatttaaattggagttgcaaaatctatttatcttgtccttaatttcttctatcttgcctgtcatgactcctcctccatattttacatatataaaactagtgctacaaactcaagatcttcttctcctatattttctatagaatgtttttcgccatcagctgtatacactacatcaccctcatttacttctacaaattccccattatcaaatactttaccttttccctttagtatataatatacttcaaaatctgttgtatggtcatgcacaccaattgaacttcctactggtaaagctactcttttaaatagtcttccttttcctttaagctcttcattttgtattatgttttcaagcttaacctttcctataccaccatttaaattttcttttacttctacttgtaattcagatttctttcttatcatagctcatcccacctgccaaacaatcaatctaactactaaattggcatatcctttccataaatatgtttgtattttaatataataataacatatattatcataaaaaaatattactgaatacacaaaaatgatactatttttacatatatttcgacttaattaaattatcttacaagttgacgtctatatgaaaaaaacatatactcatatagtatggtaaaattttgttaaactatttatctggaggttctcgacatatgtcagttttaaaaacgcaagaaaaacttaaacaacctagagatttatatttctgctgttcaatatttacctttgtaggacttgcatactatggtatgaaattggtattattattgtttttagctgaacaagtctccaaaggtggtttagggttaacaccagcagaatccgcatcaatgcttgcatcttttttagcatggacttatttctctccagttattggtggatgggtcagtgatagatttttaggtcccaaaaactgtattatacttggaatgctaatggtttcaattggttattttctaggatacatagcaaatagtaagatggatataaacatcatgatatttttatctggattaggaataggtttttataaaggaaacttacatactatggttggaaacttatataccaatgatgacccaagaaaagatggagctttctctattacgtatatggctactaatctaggtactttatttggccctttaatatgcggtttagttgctaatgaatggtttgctatgaaaagcggattatctataagtatgtatggatatagatatgtatttttattttcatcaattacggttctaataggtttattcttctttatatttggaaacagaaagttttataaacctttgaataatgaccctagtaacgggagagagtctataagaaaatcactagaatataagaaaatgctcgcttcaagacctttaactttgattgagaaaaaaagaataatagtaatattggtgttagcttttttcacagtatttttttggatagcatataaccaagcctctatgtctattgcactctatacaaaggaacacataaatcttactgttggcaattttcaaattcctacttcatggatagattcatacaatggtctcctttgtgttattcttggacctatctctgctttagtatgggtaaaattatctcaaactaaaaaaggcgatttaagtgtgccaaaaaaaatgagcttaggttttatactattagctatagcatttttgtttatgatagtagcagttatacaaacaggaacagaccctaattcaattcacaaagcaagtgtattttgggtagttggatttttaacattccaaagtataggagaaatttgcttttctccagtcgggtatggtatggtaaataaactttcgcctgaaaagtatatttcattcctaatgggtgtttggtttttaggcaaatttgcagcaaataaattatctggctatacgcaagctattatagaccaacttggtatgttacaagtcttcatagtgataccatcatttttattgatatttggaattatactacttataatgaataaaaaattagtagaattatcaaattaaaaattttttaaagttaataaaatatacaataaaaaatcgaggcattataatacctcgatttttattgtatctagtacaaactatatagctctagtgtaaacttttaaccattctctttcttcatcagttaagaaaggtgatattttatcataaactaacttatgataccagtttaaataatctttttcatccttattcattaattctggtactataccatctaagtcaataggagctaacgtaacaacttcaaattccataaattgaccatagaaattcttttcagcttttctaactacaatttcattctctgttcttataccatgagaaccttctatatatatacctggttcattagtagttaccattccttcttcaagaactgcactatcaaatctttcaggtactactctccatctaaatccatttggagcttcgtgaacatttagcacaaatcctataccatgtccagttccacattgataatcaattcccatattccacatgcaacttctagatagtatgtctaagttatatcctctacaaccatgcaagaacttagccttagaaagatttatcattcctcttgctacagaagtaaagtgtagttttaattcatcacttataggtcctaaaactgtagtcctagttatatcagtagttccatcataatattgtccacctgaatctactaaaaataatccttctgcctctaatttataatttgactctggagttgcactatagtgcatcattgcagcatgctctttatatgcagcaattgtattgaaacttggctcaaagaaaccttcttgctctcttcttaagtcctctaatttttgagtagcacttatttcagtgatttccatcttacctacatttttctttaaccagtacataaatttagtgaaagccacaccatcttttacatgtgaatttcttatattttctaattctacctcatttttttgagctttaaaaaacattactggattgaactcatcaactttctcaacttcacaaggtatattattgtaaattgtataactaagcttagttccatctaataaaactttttcagttttgtctatattttttacaaattcatacacatcattatatggctttatttgaacattttccttagctagttcatctaatatttcttcatttaacttactttcatcaacaaataaataaacttcttttaaagttattactgcataagaaagtacaactggattatatttaacatctccacctcttatattgaataaccatgctatatcatcaagagtagttattacatgagtagaagtacctttttcactcattttttctcttaatctagctaattttgagctaaaactttctccacaatatttaacatctaataaaaatgctttactatctgataaagcaggtctatctggccatataccatctattaaatcatactgatattctatctttataccttttttagataatttttcagctaatgtagctccttctctagcagatataactctaccatcaaatcctaaagttcctccttcaggaatatttttatataaatattcatctgtagttgggcaaccttcttgtcccattttgaataattttattgtacttccttctaattgagattctgcctgtataaaatatcttccatcggtccataacccagcttcgtctttagtcacaataaccgtccctgctgaaccattaaaccctgatataaattctcttgatttgaagtaatctcctacatattcactttggtgattatcagaagatggaatcatataggcatctatatttttttcttccataaattttcttaatccacttaatctatcttttatattcacaacaagacctcctcgaaataatagtttgaataactaaatatataagtatgtaaagtttattacataaatattttttgtataatttatataaatcttatacactctaattatcacaattataattttaattataatatctatttgtgtaaagctttttttcataatcaaagaggaaattacatttaattttatatttaaatgtaacttcctttatttgaagtaattcatctatttacaataattcgtcatgaattatttttcttttgttagtaaatccatagccattaatcttgttaatacatttcttattcccaataatattaaaccaaatattattaaaactgttgctattcctccaaatatctgtaaaaaaccaagtgtggctgtaaaaccagcaatctttcctgataataaacttgcaaaaaaacttgttagataccaggctcccatagataatgtagcatacttagctggagctaatttattgaacattgcaagtcctataggagataagaataattcacctactgttgtaaatatataagtcaatactataaacaatatactagcctttaccattccatctggaccattagctaatgtagcaaataccataactataaacccaacacccattattatcattcctaatcccattttaactggaatagagaaatcacctcttttggtatgagataatttaacccatagggtagctaatactgggcataaagccacacataatatagcatttagtgatgtaagccatgctactggcatttcaaatccaaatagagttctatttacattatcccttacataaatcataaaagaactttgtgtttgatagtatgctgtccagaataagaccacaaataaaaataaaataaccattgctattatcctatttttctccaacttagtaagtggtccatactcaattttttcacctttattacctttagtcacaggatattttccgacttcatttaataattttggtgcaagaagtgtaaatataatcatacctaacatcatgcctataccacaaattaaaaatgccatcttatatccataagatactatatctccacttgctcctcttactgcaaatacattatcagaaagcaatccacatattattggagctataaatgctcctacatttactgccatatagaataaactgtatgctgcatcttttcttgacacatcagttttaggatatatatccccaactatatttgaacaacttgatttaaaaaaaccatttcctaaaataattattgatagacctacccaaaccatggcaatagatgtagatgaagcaaatagtacgaaatctcctattgctattaaaagtgcacctatagaaatacatttttgttgacctaaaactttatctgctaaccagccaccgactaatggtgtaagatatataagacctgtaaataagccaaacatggatgttgcttcttgagtagaaagacctaaaccaccttgagctacacttgctgtaaaaaataataccaataaagctgttaaaccataataactaaatctttcccacaaaattgtcatgcaaataagccaaaaactcttcggatgaccactttttttagatacgctttctgtacttgacataaaaaaacgcccccttttgttttatagttgaatttaatattaatattgctttaaccattttagcacatacttataatatcatcttttctatgtttactcaatagattatcgcctgtattttcatttttttattattatttttaaaattatgaaaaatattatttttttagtatcttcagtagaaaatcttaatatatatatatttaaataacaacttaaatattcaattcttttttgtttattttttcatttttgtaaattttcattaaaaaaattcaaattaaaaatatttctttttaatatttttttgcatgttatttatttatcacttcatatatataaatagattttattacaaaataataaaagctactttagactctctatattgagagtaaaaatagcttttatccatacagttaatttttcttttttttaataaattgactttatctattctttagctttcatttgatatttatctgtaattttaacattatatttttcttttaaattttgtataagtaggttttgtttttctgatgttaaactgcttactaaatctgattttacctcttcaaatggttgatatttttcatcagttttcttaattatatgatatccataatcactttctacaagtttgttagatacctctcccttcttcaatgcaaaggctgctttttcaaaagattccaccatctgacctttaccaaagaaacctaaatctccacctgattctgcactactatcttcagaatattttttagctagagtagcaaaatcttccccagcttgggcttttttaagtatttcttcagcttctttcttaagttcagcttttttgctactactaacttgcttacctttatcatcaacagtttttattaaaatatgtgaagctctaacttgtaaataattgctcttgtttttattgtaatagttctctgcttctttatcagtaacttttgatttttcatttaaatattttgatgctactagctcttttttcatatcatcttttatatatttttcagtcaaatcaaactgttttaaaaactcttctttagtcattcccattgctgattctatactactcattaaattattatactgagcatctagttggtcattagttatacttattttctcttttgctgcttcagaggataatatatcagatgtaatcatagtttcaatcatatttgattcatatgaacgtatttcgtcatcagtcatagtagtttttgcatttaaataaaataatggctccattctctttcttaacatttcacctgttatttttttatccccaatagtagctactacctcactgctattatagtgttttgaagtagcaggcaattttcttccagcttctttaccaaaaacatagcctccacctaaacatatagctcctactgcaacaattgctacaatagctttaagtgttttgttgtttagctttatttccctttttttaactttgttatcagtatttttttcatctgacacatcatcttttttagaatttacattatctgaatttttaggttcatctaatgtattttcttttggatttttttcttcagacattaataccctccttaattttaattgtgcaatacttcacctttattattttacattaaaataatattaaatgtgtgaatcagaaatgaaactcttatgaatttaaaatgaaattaaatacttctcaaactataccttataaagtttcttcctacttttgtatctccatattttaacatttgtataacttcattcttttccttttgcaaataaatggcacattcttctaaagacttaaatatttctaaaatgtcaccttttttatttactaattcaacttttttctttccaccccttttgattatagacttatattttttaaaatattcatcatattcttcatcaatacattcaaatctataattcatttttaatgcttcaattttatcatttgtcaaaatttcatttcttttttcattagaaagccttatactaaatattttattgtttagaatattaaatatctcagatggagatttgctattatcgagatagctccattcacctttgcagtattcatctatatttaatacttcacttaaataatttattgcatctccaaagtaatccatatatccatattttaaattttctcttatgtatcctaatggaactttgagttttttactacactgtatatgagtgtcaaaaacccactcttctttagtatacaagtttatagcttttatactttttcctctttttattttaatttcttttatgtactctaaatcttcttctgtcaaacattcacttacttttttttcttcaataacatttttttctagattataattttcattttggtcaagtccttcaaacttatttaaacctattttttcactttcaacttgaacttcttttttacataattctatgtttttatcattaataattgcttctttatcatctaattttatggtattttcactaattaaccaatcttcttctattattttttcttctatttcattatcatcatttactacttctactttagttaatatttcattatcaatattaactacaactccttcttcatctatcaacttttcttcagataatattttttcgttttttaatattacttcaccttcttcttttactgactcacttttttgtctttttttcacaataccaaaccacttttttaacactcaatgttcctcctaatactttattactattctatactatcatataaaatattactgttcttataaatcacttaattttcatatgtttttgatatgatactcctcatgtttaaagaaaagatattcaagtgaaaaagatgacctatttctagtagcccaacatgacatcaaacttaagatatgcaattactgttcctaaactaatccatacatcaatttaggctagtagatttttactttctacaccactatcaaaaaacttactattatacttaggatacaatataacatttacataaatagactatattatcatttgatttgtatttattgcccataatggtattatatattaattatttacataatccaacaatttctatctatcaccttatatcttatatgtaaaaatacattcaataataattataaataacaaaaatggatttaattaatcatatagaccttgaaactcaacatgattaattaaatccattataattaatataaaaaatttaaaactatatattagatttttttactataataaggaatagttataattgtgcctattaaagcatctaccatatcaatcatagtatcttctaaccccccggcctgtgtagtagtcccaacaaaagtatccattaaaaattcacctatttcccataaactcgctactcccatactaaacataaataaaaatataactaaaaacactttactcattttacttatctctctttgtgtataaaagtatttaattatagaaaaagccacaatacaagatattatacctgaccataaatgcaaaaaatcatcataataatttatatcataaaaattaaaacaagtacctaacaatgatgaaaacattataaataaagcaagcattatatataattctttactcaataatctttcagtttgcttatttataaaactcaaaatgaaagtaccaactaaactaattgctactagacctagacttccatattctttgtttgctacaaaaaatacggcagataaaatataaactatatacaatagtatagttattggctttaaaagtttattcatatacactttaccttcctaaaaataattttataataacttaggattaacatcattatcaccatgtccataaagttttaatggcttaagagctggtccttcaagtatatttcccttatagtcaaatctagaaccatgacatggacagtcccatgttttttcttcactgttaaaattaagttcacatcctaaatgagtacatgtcgtgtctacaatataaaaatctccattatcatccttatatacaccatatctttttccatcaatattaacaatctttccttctccattatttttaggcatatctccactacctatttttaattttccacttacataatttattgctacgtttgcattttcctttataaaatcttttgaaaagtagctacctaatctggatggattaaaagtatctttataatcagaattattatttattatcaaatcttttattattattccagcagcagttccattagtaattccccatttagagaatcctgtagctacataaatattgtcttctcttttgttgatataaccaatataaggaacattgtcaaaactcatattatcttgagcagaccatttccccttaaaatcttttaccttaaagacttctttaccataatgctctaaatcatcaaatatttctttctcagttcctccctggccaactttatggtctcctcctccaaaaatcagtaaattttcacttccattattatattgtctaaaagttattgatgggtcatctatacttataaacataccatctgctaatttattttccaaaactgcaaccattaaataagcacgctctgcatattcttttgcaaaataaaaattcaatccatcataccatggactatgagatgaaattataacattctcagcttctattatattatcttctcttgttttaaccctacatatttttcctttttcaagatctactactggtgtattttcatatatttttagccctaaatttactgctgcttttgccaatccatcaatatacttctttgggttaaattgaccttgattagtaaaactaatagccccctttatatctaatggaatattttctatagtttcatgatactcacaatttattcctatttttttacatgtacgatattcatctttaatattctttatagtatcctctttttctgtaaatacaaaagaagtttcccttttaaaatcacattttatattgttttcttctattatttgttcaactaaatttaaagcttcattatttgcattataatatgattttgctttatctaatccatattttttctctatcttagagtaaaatatatcatgctgacaagttaccttaccagtattccttccagaagttccatatcctattttatcagcctcaacaagcactacttttttaccttcttttgctaataaatatgcagttgtcaatccagttattccaccacctactataagacaatctgtttttatattttcacctaatttgttatattcttttggacttgagtttaaaaaccaatatgattcattcatttaaaatactcctttacatattaaatagtaatagttttcccatcatggagtttatttattataaatagtataaaaaataagcttaataaaaagctaaatgaaaaatcacttagttttcttgttttatacaccagactaaacttatatatatttataatttctatattattttcttaatcaatagtatttatgctaagtaaaaatgaggatattctagatttcaatacataagattatattgtgctaacaattataaattgttagccaccaacttttttattgatttagttcgtttaatatttttctgatatgtaatataacaatctctctataaaaatatttacttaaaaatttattttatataaattaattgtaattcttacttatattcttttgtaaatagaaaaggagtataaaataatagtataaatatcaatctttgtataatactatggtaattaataattatttcagaatcattgaaaattaatcctaagctattaattagaacatgcattatagagcaaaaccatatgttcttagttttcatataaacataacctaaaaatatagaaagtccaataccatatatcaaatgggctatagctccaattattggagtttgaggactatatagtgtaaattgtaaaggtaagtgccataaactccaacaagtgcctaccattacaatacctatttttttgccaaatctatcaaataaaatactttgtaaaaaagatctccaaccatactcttcacataaaaaaggataaatatatactaatgatattataggaagaagaatataattcaagaaattcttataatcaaattgattatcacttattattaatccaaaaataatttgagaaaataaaaagtaaaaaactagcaaaatacctatcttaaaatttttaaaaatatataaacttgttattttataagaataaataataacacataaactacttattaaaattaacataaaatacattaattgaaattgattaatacttattaactttaatgattcaataataaatataaaaaagtaaataataaaaaataatattactgatgaatagaaattatatttatcattatttcttccttctgtgtaaaattttgcaatagaaactgaagataatggcaatatcatcataaattgagctaaaatttctgaatctattaaatgattaaaacatattgctaataaacctagtgaataagataaaccataagttatagaaaaaaatattataacttgtagtttttttctttttatttcatcactgacatatgttggctttaaaaagtttacccattttgattgtaaattcaacaaacataacctccctttttataaaaaataattgtaaaaatcataaaatttttctacttatactcatatcattatatttctatatatttataaagtccttattacttacacgactgctgactaaactcttataattctttttttgaatatgtatttacagaagaaatatccaatttcgttagaaatttattcttctgtttaaaatttatataaaaatcatttttatgcaatcagtttactattatttttttaatattacaatatatttttatatacaaaaaaatacaacaaatattattttctagttcgagtgaatattaaaataatatataattttatttatattctaacttaaaaacaatttaaatacaaataaagcaaaacacacttattttacttatataaaaataaaagactgtcaagataacaattacaaatcgttatataacagcctcataaaatccttattttaataaaatccttattttaataaaatccttattttaaaataattcagcaatatattaatttttataaaacatcatattttaagttcttgaatatcctttaattgctatacttcttgatttaatggttttttaagtaatgctaaaagcatcattccaaccaaagcacctacagctatagctaatatatatgcaaatggatgggtaaccactggtataacaaatactcctccatgaggtgcacgaagagctgcgttgaacaacatactaagtgctcctgccactgctgaacctccaacacaagctggtataacatgaagtgggtctccagctgcaaaaggtatagctccttcagtaacaaatgataatcccattacataattaactttaccagaatctctttcctctttagtaaatctattcttaaaaaatgtagttgcaagagctatagcaagtggcggaaccataccaccagccattactgctgccattatttcaaactgccctgattcaagtgatgcaactccaaatacatatgctgctttatttacaggtccacccatatccacagccatcattccacctaatactaatcctaaaactatttttgaagttccgcctaaaccatttaaaaatccaaccattgcattattaattgctgtaactggaggtattactaaaaatgtcattataattcccatcaaaagtgttccaagtaaagggtataacaatactggttttattccttccaatgaagctggtagtacactaaatattttcttaagcccttctactaaataacctgctataaaacctgcaagtagtgcacctaaaaatcctgaaccaccatcacctgctagagcacctcctacaaatcctacaacaaacgctggtctatcagatatagagtatgctatatatccagcaagtacaggtaacataaatccaaaagctttatctcctatccctttaaaaaacgctgctatcggtgtatttgaaccaaagtttgaagggttaatagtataatcatcaagtaaaaaggctatcgctataagtatccctccaccaataacaaatggtaacatattagatacaccattcattaagtgtttgtatacttttctaaatccactttcactttcttcatttgattcgttgtgacttccatctcctccatggtaaattggagcatctccatttacagccttgtctataagttcttccgctttgtgtataccatcagccaccttagtttttatgacttttttgccattaaatctagccatctcaacatttttatctgctgccactattatacatgttgcattttctatttcatcttttgtaagcttatttttaacacctgctgaaccattagtttctacttttattgatacacctttgttttctgccattttatttaaactttcagctgccataaatgtatgtgctattccagttggacatgctgttactgctaaaaccttaggatacttattagcatcattctctttagtatctattatatttttttcagccactttctcatcttgatattcttcactgaatttttctctttcctttttatctattatttccttaaattctttttcagagcttgaatttataagtttatttctaaagtcttcatccataagtattgtagataatcttgataatacttcaagatgagtattgttagctccgtctggtgcagctatcataaaaaatagatttgataaacttccgtcaaacgattcataatctataccttcttttgacactgctgctgctatacaagctttagtaactgaagaatttttagcatgaggtatagctacaccttctccaattcctgttgtactcatttcttcacgagccaaaattgcttttttgtagttttctttatcatttaaatttccactatttgcgaccaaatctactaattcttctattgcttctgatttggtttttgaatttaaatttaacttaattgacttttcatctaataaatctataattttcataaatattaattacctttctatatattttttaatattttaaaactgctttacagatatctcatttaccaatttatcaatgtattctcttttggctaagtcatatgaaaaagcagttgcactacctgaagctgctcccaatttaagagcataatcatatttcccagtattcaaatacccagatataaatcctgctaccattgaatcacctgctcctacagaattttttacttttcctttagggacatcacttataagcacttcatcttcctctgtaatcaacaatgctccatcttttcccattgataccaagacatttatagctcccatttcctttaatcttttagcatattttaccatgtcttcaattgaatttaatttaacaccaaatagttcttctaattcgtcgttattaggcttaattagaaaaggtttgtattttaaaacattaagaagaagatttttagttgcatctactacaacttttatattctttttttctaatctagccattatattttcgtatagtttttcatctaaagtagatggtatacttcctgccaatattaaaatatcatcttgatttagcttatcaagttttttatataaagtatcaatgtcttcatcatctatatttggaccttgtccattaatctcagtttcctttaacgcctttatttttacatttattcttgaaaaaccactttttatctttataaaatctgtcttcaattctttttcttccaatgttcttattatatattctccagtaaaaccacttataaaacctaaagatgtattatcatttccaagttccttaagtatgcgagatacatttataccttttcctcctggataaacgtattcttcttttacacgatttgtacttcctgtctttagctcatctagcttaactatataatctattgatggatttaatgtcactgtataaatcatattgccacctcttttttatttatttgctttatgtttatatcttaactttatattaatatccttgaaagtcaaaaaatttctcttaattaaaagagaaatttatcgtttttatcttatttagttttatattatccaaatttacaggtgtatatacaatactacccatctaattaaataaatttacaaatttttcaaaactactattttcacatatacttataacttttgctatagaatctactcttttatatatttttgaaaatattacttcataatctaatattttatctttatcaagggctaacattattattaaacgaacatctgatatttcccaagaaataggcttctttaatataccaattgctattttattatcaaaaatttttccaatagctccatgtggtatagttaccatattccctatttctgttgttgctattttttctctctcaaagtaagattttttcatatcctcatctatatagcccttttgtacaagtttacttgccataaaatctataacttcttctttccttttaaacaccaaatcagtaaaaaataattcactatcaaacaggctttttatatctaaatctaggtatatatttcctgtttctatatatttttcaattaatctaatttctttctcacttaaaattggagatatatttattactggcacatctcctacttcaataggaacagtagatattacaaaatcaacatctataacttttatatattcaactaagtatgaaggaataatctttagtatttctaatttttccttaaatatattctctaatttagcttttattaacattgatgtgcctatgcctgaagtacaaactattatagttttgaaaaccttatctttattattataagatgctctttcaactgctcctcctatatgtagagctatgtttgcaacttcatcttcattaatttctatcttcaaatctttttctattgtctttttagctatattagctagttcaaaagcaaatggatattttatttttatatcttgagccattataggtgattgatttatacctaactttatttttttacataaactactaatatgcttatataaaaactcttcaaataccttatcattacttatatctattgatgtagctaattttaaatttttacaaaatgtttttattgaatttattataatttctttgttttgttcattttctaaaattgagcttcttttgctcctataattttctatataattctctataaattctttttcattatacttatgtctgcttaacataactaatatattatttaacacactcttaaattctatatcagttaatactaatccattttcatttaatatgtctaataataatttttttattaatagttttctttcctttatatcgtcatttaaaaaatcatttaaactcaattgattatctctcttattgcttaagtcaactatacaatttaatatcttatcttcactttccaaaacacatataccttgtttatgcttagatttaactgatattgaatacttttccaatattctttttacttcttttaaatcattttttactgttgaaacacttacatacatagaatcggctaaatcttcaagttttatagtatttttttcttcattacttaaggttaatatttttctgattatatattctactctatctacatcatcatagagattgctatttagatttacctcatcaaaacttccttctagtttataaccaactcctcttattgacaaaattttaccatttctaagttgtttattaatatcctttatttcattttgtatagtttttgaagaacatcctatctcttgacttaaggcaataccactaattgtatcttttgaatttaacaatatttttattatatttatctgtcttgctgttatatttaaactcataaactcaccttttactctagatattgatttcttaattttcttatttcttctttatttaaattaaattctccatataaatatgcttctacactaatgtattcttcatcaattcttctaaatgcagttttcatatactcttcatttacaccaaatatatattttaaattttcttttggaatgtccttaaatttaggcttatattctataaatctttctatctctttatctgcaaaatcattactttttagataatctttcattatattctctctcgatacccctaaaatcataagaattatagcactccccacaccagttctatccttaccagctgtacaatgatttaatattggtaaattagaatagtctcttataagttctactaattttttatatgacggattatttataggcaaattatagtaactattatttaacatattaaatgcaccatctttttcaaacaatccatcaatcatatcttcaatagaaccaaaacttcctcctgattcttctagctctctcattgctggtattcttatattttttatatttgatattattgttgatggatgtttacgagcttcttcatcacttctataatcaaatatatatttaatatttaactcttttaaaatctttatatcattttcacttagatttgataattttgcagacctataaaataatcccttctttacagttctgccatcctcagttttgttcccacctaaatctctaaaatttttcatcttagcacctcttaaaaaccatatattatactttttttaatatctataaattaattttatcacaattttaagttctttatttaaaatattttttagtatttggttattaattgtaaaatataaaagtatctctttatacaaaattaacctaaattttacataatttatttactttacataagctttatagtttataatcaatatacagtagtatattttctgtaaaaaagaccatatttagaataatatcaaatacattggaggttttatattatggatattcaaaagcaaaagaattttataattaaatttacatatgtagttttaataacaagtattgtatatattgtattaaaattcttattgccattattaatgccttttgtaatcagttttatcattgcatccatcttaagacctattataagacttattacaaataatacaaatttaaatcgtacacttatttctatagtaatacttttaattttttatgggttgtgtatatttttattagttagctttggtgtgaagatatttgcaagtgtaagtgatgtattttttagacttcctgaaatatataaatcaagtatacaaccaacgctaaatactttattttcaaagatagatgctagtacacctaatgttaacctatcattaatacttggttgggataatataagtcaatctatgatgtctttagtagcttctatttcaacaaatgcactcaatgctattgctagtattgcaagtaaaacacctgcatttatgttaaaacttattattactttaattgcttcttttttctttacttttgactatcaaaaaatagtaaactttatcttaaaacaatttccagaaaaaagtcaatttatgataataaatataaaaaatagcagtattaatgctcttttaaaactactaaaagcctatgcaatactactatcagtgacattcttagaactacttattggacttactatcctaaaggttgaaaatgcatttactatatctgtcatcatagcacttgttgatattttgccagtcttgggtacaggaagtattttgacaccttggatgattatctcactcattaatggaaatattaatttagcaataggacttttaatactatacataattataaccgttgttagacaaatattagaaccaaaggtagtaggacaccaaattggcctatatcctttaataacattaatgtgtatgtttattggagctcaactatttggaatagctggattatttggattccctatcgcagctacaatcataaaaaacttacatgataatgggattattactgcatttaaatagtttaaccttgacatttttatttaaattaaaaagggctttctcaaacagggataagctctttttaattgttaaaatgatgaaaatacatttgattttatacaaaaagagtgcctcataaactaaaaagtctattctaagacactccctttttttctactctgcacaaataatatcaatcatttctttatattcattttcattatttaaaacatctatatttttaaatttttcttttattttttcttcaatctctaatgaataatctattgtatatggaataaatttctctacttcttttatatatcctacagaaaaaaattcagcattataaactacagaaaataaaattaacattaagcaatcattctttatcatagttattacagatttatttttattattaattttaaaactatctattaactcaatagtaaaatttattagtttatttacaactttatctaaagtaccctcttttgacatctctgtaataatagttttatggttgtattttaaatcttcttttatatcttgtaaatcatcagatatttgtaataaaaatccatatcctatacaaaactctatttcttcctttgtcataaatccacttattaaatatccatctactaaaacggatgaacctcctttttcaatagaaatggataataaatcttctttacacaaatgattttccttaccatgttgttttaaactatttacttgacttttaaatattaataataacgattcataaacttgtgtaaacttttctctagggtatacactttcaatataatctatcatttgagatactttactttcatgataatccttagatttaatatgttctcccaggagccttttttctaaccagttattaaataaaatcttatcatttttatctatatttgtattgtctaaataattatcagtatatggatataacatactatatgcaaagttagcttttgaataatatatttctttaccaaataataattgtaatgcatttgaaatccatacattcctcatagcttgcataatatcacctataggtaaatcatcatcaaattttctagcatctctaataaactgttttgttatatctaaaaatttttttctatcctctacatccattttttctaacttaaaaatattttctttttccaatgtcttttgtaagaaaacctcgcccttttttacccacatttttctcaatacagcatcacttggatacctctctaaatgaactgatattgtatttataaatttatctaattctttttccctctttttttgtgaatctttactatacgtttctatatcctcaaataattcaacactcgaattattccatgtattttcacactctttacaatagtatttaaatatgccacttaaatccatttaacagccctactttcatgcctaaactatacactatattatatcagtacatataactaatatacagttaaagttataattgtgtataataataactttaaaattatttgttttttagcttagctaatgcttctgcaaatggattattaaatgtctcttgatttttattttgattttttaaatattgattaacatctttttttgatgccttctgtttttcttcttgctttctcttgttgaaagaagacaacttttctctgtatccgcaactacaagtgaagattctcccctcaccttctccacgaagttctaattttttatgacagttaggacatcttgaattggttacttgtgatatagtttttctagtattacactctctatcttcacaaatcaacatcttaccttttttaccatttacctctaacataaatttaccacattctggacatctatttttagttaagttatcatgtttaaatttattatcactattttttacttctagtacaatatcttttgaataatctttcatgtcatttatgaatgtatttttactaagttttccctttgaaatatccaataatttcttttcccatgaagctgtaagttctggtgtctttaagtctactggaactaaatctaataattgtcttccttttgatgttatatatatctctttatttttcttttccattaaaaatgaattgaataatttttctattatatctgctcttgtagcaactgtccctagaccattcttttccatagcagtcaataatgttccctcatttaagtatggtggtggatttgtttttcctgaagttatctttaatcccttgaccttaagtacatctttttctaaaacatttggtatactttcatactcatcttcatcttcaatatctttataactttctttccaacctaaatttattactttgtttcccttagccttaaatatttctccttctacagttgcacttatagttgtctgctcatattcaaaaggaggagatagtactgctaaaaatctttttactacaagattatatatttttcgctctttgtcactaaaatcactcatgaataccttctgttctgttggtattattgcatggtggtctgttacctttgaattgtcaacaaacgatttattagctataatattgctttttaataatttattacaaatctttgaataatcactaatatttacagcttttattctatcttttaatgttccaacaatatctgatgttaaatatctagaatcagttctaggataagtaagtactttatgatgttcatacagtttttgcattatagataaagtttcttttgctgaaaatccaaacattttatttgcatctctttgtaattctgttaaatcatagagtgcaggtgaatattttttcttatatgacttgtttacttcagatatttttatgtctacaccttttactttttttaatatggattctatcttttctttactaaaagttgaagaattattgtttttatcattccaaataaattttatatctgaatttccctttgtagcaattaattctaatccataatactctttaggtttgaaatttcttatttcttcttctcttttaagcaacattgcaagagtaggagtttgtactcttccacaagaaagctgtgcattgtactttgttgtcaaagctctggttgcatttattccaataatccaatcagcttctgctcgtgctattgctgagtaatacaaattttcatattcttttccacttcttaattttgcaaatccgtcttttattgctttgtctgtacttgaagaaatccaaagacgttttataggtttttttacctgtgatttttctattatccaccttgctacaagttctccttcacgacctgcatctgttgctataactatttcatctatatcatttctattcatttgcgatttaactgtattaaactgctttccactcttttttattacaacagtcttaaggtgcttgggaagtattggcaggtcttctaagctccatgatttatatctttctccataactttcggggtcagcaagtgtaaccaaatgacctagtgcccaagttatcacatactttggcccctctatataaccatttttttcattttttgaccctaaaacttttgctatatctcttccaacagaaggtttttctgctagcactaatatttttcccatctaaaaatacatcctttctctatacataatctcatattacgcttaaaatctaactaaatagaacttttcttaatatcgtaactataatattaccataatttaatcatatctaattaattatttaagattttattatttttttatttaaaacttattttacacttcatttgtatgtgtattacaaaattcatttttacgtatattactcatctttctaagtttataattcgtaaataggcttacatttttatattttttctttgttttttaattttttagttgacaaaacataaaaacttatattaatattattaatacaataagctatgacaaatcaatatccggttaagattttatagaagagttgctatatagcacaccgaaggagtaacactctcaggtacttttaaaagtaggactgtaaaatttacggaactctggagagacccattatgggcgccgaaggggcaaggcttttatgctcaatctctcaggcaaaaggacagggattatctaccaaaaacagtatttactaatacttttattttggttgctaattagtgtacatccagagctgaatcttttttagatttagctttttttattacactagaaattattaataaattatacttatttcctgtcaattacttcattaaaaattctattgattatgtaaagcaaaaaaaatgagggagtgtttttatgaatctaattgatattttaaacaaagttgatgcttttatttggggaccacccctactggtactattagttggtactggtatactacttactgttaagcttggagttgttcaaataactaaactgccaagagctcttaagttaatattctctgctgaaaacaaaggtagtggtgatgtttcaagttttgcagccttatgtactgctctagctgctacagttggtactggtaatattgttggtgttgctacagctatcaaagctggtggacctggtgcacttttttggatgtggatagcagcattctttggaatggctactaagtattcagaaggtgttcttgcaataaaatacagaactaaagataaaaatggtcaagtgtctggtgggccaatgtattacatagtaaatggtatgggagaaaaatggagacctcttgcaatatttttcgctataagtggtatactagttgcacttttaggaatcggtacttttactcaagtaaattcaataacagatgcaataaataatagtttcgggatagaccctagaattacaggggttgtattagcagtatttgtagctttggttgtatttggaggacttagaagtatatctaatgtagctactaaaatagtaccttttatggcagttatatatgttgtaatctgtggaatcattttaatatctttttggaataaaatccctgaaacttttatgttaataattaaaagtgcatttacacctactgctgctactggtggttttttaggagcaactatgtcactggcaattagaaatggtattgctcgtggtgtattttcaaatgagtctggtctaggtagtgctccaatagctgcagctgctgctaaaactgaatggccagcggaacaaggtcttatatctatgacaggtacttttatagatactattataatctgtactcttactggattctctcttgttatttcaggagtgtggtgttcagacctaaatggagctgttatgacacaagcagcttttaacggagcaattcctacatttggaccaatattacttacagttagtttaacattatttgcatttactacaattttgggatggagttattatggagaaagatgttttgaatttctgtttggtgtaaaaggcatgaatgggtatagaactgtatttgtggctatggtgttattaggtgctttcttaaagttagaagttgtttggataattgctgatattgtaaatgggcttatggcaatacctaaccttatagctttacttgcattatcacctataatagtatctgaaactaaaaaatattttgaacatataaattctccagaaaatcagataaagaaaaatgcataaataaaaagtatagaatcccaagtcaattttatatggctttcggattctatatttttttgaaaaaatgtaataaatatatttacaaaatacggtgattaatataataaaacatagtaattgatataaataatacatatattttaattaaccacttcaatgaaaattatttagattaaaactttatttcttctgggtatttccaagattcaaactcatcaacatctactacttcaagttctttaaattgatttaatactaaagacctatagtatatttctgctacctcttcaacatatcttgattttaataatgcttcgtctaaatcattacctacagttgtcaacccatgtctttctaataagcatgcatctgtatctatcagtaattttgaaacgctcttagctaattttaaagttcctggtctttcgtatggagcaatatctacataaccgccataattaactgattcatatacaattggtataattggtttctttgctactgaaaatgctgttgcatataaagaatgagtatgtgatatagcatttatattttcccttattttatatatttcaatatgcatcaatacctcactacttggcttaatacctttctcaacttctattacatttccattcaaatccaatacacaaatatgttcaacgtttaattcttctcttcctatacctgatggggttataagtatatatccagtatccttatctctaatactaaaattaccagtcttttctttacataaaccataatgctctgctttaattgctatttccacaactttaccttttaaagagtctagcataattcacctccagataatcatttttgaccatagtatgcattttttccatgttttcttgaaaaatgcttattcataagaaccttatccataatattatcaggactcattaactctgtataataagccatctttgcgacttcttctaaaactactgcattgtgtacagcctcatttgcatcttttccccatgtaaaaggtccgtggtcatttacaattattcctggacaatgaattggatttcttcccataaattcttcaatgattacatttccagtttccttttcgtattcattgcaaatttcttctctagtcatttttctggtacatggtatgcttccataaaaataatctgcatgagtagtaccacaagatggtatagattttcctatttgagcccaaattgttgcccaacttgaatgtgtatgtactattccccccaattcttcaaactctttatataaaactagatgagtcggagtatctgaggagggtcttagtttgccatcaactacatttccctctaaatcaactacaaccatatcttctacagtcatattactatactctacaccacttggttttatcaccactaatcctttttctctatctatcccacttacatttccccaagtataagtaattagctttttcttaggtaattctaagtttgcttttaatacttcttcttttaaaatttctagcacttttcttcctcctatattttatttaatgtcatagttataaaatttaattgtttttagaattttttattaaatttttatatttctactaggattttattgaaattaatttctctcttgctcattttacttaaaaagtcacccacttcattaagacctattttatgtgaaatcatgggtttaaaaataatgtcaccttttcccataaaatccaatgttgcagtccatgctcttccaggataagggcttgcatatgaattccaagaacctttcaaggtaagttctccacgtaatatacactcagtagcgtctgcactaagtggtaattctgtgtgtgatatacctacaaacactatatttcctctcttttttgctacaaatagagattgttcttgtgtaaatcggctaccagcagtctctattacaacatcagcaccaccatttgttattttttttatttctttgattacatttacttcttttgagttaagtatatagtttgctcctagaagtttagaaagttctaatttttcatcaaaaatatcaactgctataatcttagatgcaccaaacacctttgcccattgtataacaaactgacctattggaccacatcctaacacaactacactatctcctactctaatattagactttgaaatcccatgataagctatagttgctggttcaattccggcagcagtttcataatccaatgtatctggtagttttaaaatatgttcttctggaactcttacatattctgcaaacgctccatttactcttgttccaattatattgtaatcatcacacaagccaaaattaccttcattacaataatcacattttccacaaggtactaatggtgcaacagctactctatctcctacattaatatgctttactttttctccaattttaacaacttcaccagaaaattcatgtcctaaaatcaatggatattttgtatttccactcaaaccacttaccatagacctaggcaaatctgaaccacatatcccaacatattttacatttacaagcacttgcgtatctgttatttctggtatatctaccatttcatacctgacatcacctacattatacaatactgatgctctcattttatctcccatataaatatctcctttcatgctatatacttctatatagcaatatctatgccatacaaaagataaatggtttattcaggcaaatgccttatatacaaagtcttttaccagtagagattacattttataaaattaaaccacattactgtataaatataaaagagtatgttttaaatagcaggttatacagaaaactcaactataaaaatacaatgcattataattacaaatattatcaaataaaaagaagtctatatttcatttaaatatttctcaggtattatctgatacttatataaaatcaattataaactcctttaattattcttatttcatttttataaacttaaactgctacaggctcttcttctacatttttaagtgcttgtttttctaaataatcaagaatacttgttttgttctttctaaacaatgcccatagaacaaagtaaattacaactgaaagacctatataaattggatttgcacttagaaatgcaaagaaaactaatcccatcaaaggttttcctagtatattaaagcttgttattaacattgctcctgcaggtatagctacacctatatttgtagccatatctgtaaataatggtgctgtagatgtacaaacatataatcctaatccaaaccaaattatacctgaaactaatacttttggtatattaccattatgtatggcaactaaaccttgaaccatatatggaattgccaacaaatccacaactggtaataccttattaccaggaagtaccatagatattacaagcattattggaattaatataagacctgatattaaagttgcaggttcaccatatccaacagcatcatttactgctatgtaccactcacggtttccagctttttgcataatctttctagctgcttctgttataggtgcaaatgcttgagcaaacatacttgctactttagggaaaatcgccatcactgcacttgtagatatacctactttcattatttctccccaagcttccatagtatttattctcgtcatattacctaatatacctataaacatacctaaaaaaagacctaaagtaattggttcacctaaaaaccctaatttcttctctaattcttttggatttaattttattttatttaatcccaatttattgtatatagggtctgaaaatactgcaaacacagaagcctcaacattatgcatagctattattgtacaattaggatatctatagtaactagaccatctctttgcaactaactctgatattaataaactatataagtttaataaaaccatacatgctatacctaaaggaaaatttcctgttactcctataaccattgctccccataccatataagaatagttattccataaatctgatggttgaaacacgtctgtccattttatcaaaaataaaattgtttgtaataatataccaagacctaaatatatcatacctgcacttgttgaaaatgcaaccaatgatgttgcttgccaaccaacatcaaaaactggtaggtttactcctgtactctcaaccatcctattgataactggtgttattattggtgtaaatgaatttaaaatcagtgtaaaaccttgtaaagcaactcctgcatacacagcagaaagaaacgatttcttagtagttactttaaatatctttgctattatgaatattataattggaactataattgcagaaccaaatgtatcgattatagatttcataaattctaacatctttttccctcctacttataaatatttataagcttaatttaatacttaagtgactatttttataattttttaatttatgacaacatataaaatgttttttccacaaatatttagttaatattagcttattatagtatctaaatcattgatttaaatactataaattcacgtctccaaaacttacttatctatgccttcaataacagtcaaaacttcttcaaagaatgcctcttcccctataccagttaggcaagcaaatgcatttatagttggtattccataatcgcctgtttgaagcggactcgtaaatgttataaagtcaaatcttcctgattgtgctaaatttagtgcttctgttggtctagcttctgttgtagtaatagaaatccccttattacctagtacttcttttaatttacctgctaccatagatgatgtaactgtccctgaaccacaaactgataatacattaaattgtttcataataatttcctcctaatttttcactctaaatttttattttatataagattaaacctattaaaaaaataatacttactttgattgttgaaattttaattttttatttataaaattctcctacattaaatttctataaaatccaataatttagctacttcttcttttgttgatgcgttttttatattttttaataactttatattttgaaaaactgacattaaatcttttaacagttttacttgtgaatctgggttctttactgctaataaaaatacaagttctacatcaagtctatcttttgggtctatcattgaattaaactttacaggatttttcaatatccctacagctacattagactcatttacatgctttgaatctgtatgtggaatagcaacacacatttctccaatatctagacctgttggtaatgtcctttctctttccaagacagcatttatgtatgtttcttttacatattcttttttacacattatacttcctaattcttcaataacactttcataatcattagattctaaacccaatgatattaaatctacattcattactctaactcctctcaatttttttgctatggctacagatgtttaaatttatcaaatataatccttctaaaagcatctttatcaaaacacttattggcattgttcataaattctgcatcttttagtatctcaagaacatttttaacaatctctttatcattagcctgaaaaactggcataaatatgaaatttacattacctacaccccaatcaataggattctttagtttaacaaaaacaaaccttgtactatttacagtagaagaatctccatgaggcacacctatagctcctttagaatatgttggaagcatttcttctctatgtaaaacagaatctaagtaatctttttctacatattctttatttataagaattgaacatacatattctaataaatcctttttaaaatatatatctggttcaaaaatcactaaatcctcatcaagcattctttcatacgatttaactggtctgtcatcttgttgttttgattttgatagatagatatccaaatttttgaaaagttctttattatagggtataaaatttatacctggtatcttagggtttattgtcccaacaatagctaatatattgtttgtctcttttagattttcaattttacaaaataaattttcatccaatgcactcatttgataacatttagtgttatcatacttttcttccaacgttttacttatatacttagcagttccttctccagtaagacataatgttacaattgcatttgatttatctatgtgtttttctaattcatagttatatcccatcctatcttttagcaaagaaaaaaatatttcatcaagttcttcctctcccatagaaacttttctagttgcttctagtgccattaggaggtctactctatcaatagttttagtgcttatattggttctcttatttactatttgacctatgtttgtaagtgaaccaatatccaccaaaaacaatatacctttcccttggtctattatttttgacagttctactgccttattgtatatatttattggtttttcatctaaaggcatatctatagccacaggaaactttacacctaaaagttctttaactacatttacagtctctgtagctatacgtccatgagaaattattattaaccctactttatcttttttcacttcattttttagagcagactttatgtagagtgttataaatccaatttcatcatctggaatcttaatactaattgattcctcaatttttattgcaaaacttttactaatttcatattcttttgaaaagtcaatctttattttttctaaatttacatttattatcttttgatttagcttaattctttttatagcttcttctaagtgtattgctagatatttgaacatatttttatttacttctaaattcatatttttttcaactatatcattcataagttcttttaccagtttaactaaactatcacttacaaaactatttaaatcactcattgaaaaaatttcttcattactatcgagattaaactttaagtcagcaaatctatttaaaataaaagtccataaaatattctctatatctatatcttcaatgtctagggattttaggtcataatatttcttttcaattgttttgtatatgtcctctggtaatatatattcatcacttaaaagacttccttttactgatgattcttctaaattaaatggtataaatatagcatttttcaaatattttcttatctctgtatattcaatctcttgaaaggcagcatctttaaaagaatctttaagctttaaaacttcatttatatctactactactatcgattcactatcttcatctttggaatttataaacttcataaaagctcttgcacaaagaacctgaatcatattttgtaattgtcctatatttccactaaacttttttagtacaagtatttcaatcacatttttatctacaaatatttttgcatttattctattacactcttgttgaaagatattgtatataaggtctattttctcttttagtaatctatcatgtaatggtggcaaagttattagcattggtatccttcttctgaatgttaataataaattagtctctacattttcagtagttgccccaatcaacataatacttacttttctttcagcattagtttcacctaatctcctaaactttcccctatctaagatagaaaatagtatttcttgaccttttggaggcaatctatgtatttcatccaaaaataaaactccttcatcagcttcttctacaagacctggtgtatcatattcagcacctgtaaatgcaccttttttatatccaaataacaaagataataataattgtggattgtcactataatcagcacagttaaatacaacaaaattggagctttcttttactatctttttttgctttgcaaactcatacatatgtctagaaaataaactcttaccaactccactttccccaataatcaacgttggtaatccttttggtggatacaatatagcagatttagcctgctccacagcatttctaagactccctttattacctatcagagtttcaaatgggtcattcgattcttcttcagattcctctactacatccatttctaaactttctttaggtaaaagttcctccacaactcttctcgatatattaaagccttctgtcatcaattcccttgtaatttctgatatagaaatattcttattcttttgtaatattgccgaaattgctgattttaaataaggatatcttctttgccttgaattacttatattaagttcttttctcaaattagttatgttctctctagttgtacttaaaaactttgctatttgaacatctgttaatggatcttttttattttctgtatttatgatgtttacaagtttatctctcaactccatgcttaataactcctttcttgataaatatataagcaactatcatgccatacttactttgatatttttttctacttaaaccctgtaagtaactagatgtcataagtatttatacattttgataagtatttacattttgtatatttagtaatttactaaatgtattagttattcataatcttaaataatttaactctttgtttaaattttaatgcaaaatactttataaatttatgattgaaaaacttgctcaatcatatataatagtacgtatctactcaacaataaaaattataataaactgtgtttttaaccctttctattttaagattttatttttatatgatagtatacatacttatataggtaaggttttagctatataaatagttttaacatgatttaatatggcatattatactattttaacttaaaaattaacttataaatattaaatttatatacagaagggaaaacgatatgaatacatttaaaactgaagttttattaaaatattctgcaaaagacatatttaatatatttacaaaatctgcaagactaaattttcctaattttaatgagaaaaaagcagtaggaacatttgtacaacaaaaaaataataaaagatttaaggttgaaataactaatttcgaaaaaaatagagtatatgagataaaaacaagcaataaaagagaaagtactattactagatatgaattagtacatattgacttagaaaatacaaaacttatttttattgaaagtgagagcaagaggaatatatttggaaaaatcaattcagctcttgtaagagtattgtttggaaaaaggcaaccagaagaatttaataaatttataaaaaaactagaaatggaattggagaataatagtgttaatttatagatataagttagattatatatttaaaatctatctaaaaacatatttctaagtattttatgagtcctactattcgttacaataattaatgaaaaaactattgataaacatgtgacactatgactatataccacattaagagtatcattagcaataataattttatgtattattgcttttagttaaaaaaagagagaaaaattaataatctctaatatcccttaaactttcaataaagaggataatctttatctaataagattatcctcttctaatttagaaaagatattaatttattcactatatagtatttttgtacaaatcaataaaaaatatatgtcatattcttatctctaatagaaaatatattcccctcttccataaaactctcaatatcttttttatctataaatctatactacttagttctcaagcataaaataatataaagattctttatacatgatgatatattatattgactattagacatttgtctaatataatcaagttaaaggtgagtgattatattgaaaaaaataccaaaatccgagttgttagttatgaatttcatatgggataaaggcatagataaaataccagccagagaagtagctaattatatggaaatttctcatggatggacaaaaggtactactggtaaagtactttctagattaagtgataaaggttttttagaatttgaaaaagatggtagaaatactttatacactattaaagttaaacatgaggaatatctaaaatttgaaacaaaggattttttagagcttatacataaaaattctattcatagctttatatcatcattaggttgtggaaatgaaatatcagatgatgacataaaagaacttgaacaatggctaaaaaaaagaaaataggagacgtattttatggaattatttatagaagttattaaatttaatatttacataagtctactaattctttttttcattttatttactaaaaagataagcaaatatacttttaagtttaattattttatatgtcttttaatagtagtcagaatgatgtttatatctaaaataaatttaaatatattaaatatcaataatactactattaatatctataaacataatctcgataattatataccatatgaccagggcattactttagatatatttatgtacatctggatattaggaattatagcaatctctttttactatttaagaacaaattttaaattttataattacatagaaaattttaaaaaagaaattttagaaatagatattactagtatcttagatgaacaagcaaaagaactaagtataaataaaaaacttcagatatataaggttaaaggtatttattcccctgccattataggtttaacacgctgtaaaataataattccagaaaaaaagtacaataataaagagttaagatttatctttaaacatgaattaattcattataaaagaaaagataacttatttaagcttctaattagtataatatgtatcatacattggttcaatccaattttatacttattaaaaaaatattttcatgaattatgtgaattatcttgtgatgaaattgtgattgacaaatgtaccacgagtgaaattaaagagtatgcatatataatattaaatacaataaagtatcaaaaaactttgaagtattcatcattcgtatctcagtttctaaataaaaaaaatattattttaaaaaagaggttaaattctatgtttaatcaagataaaaagaaaattaatttaggtcttaagtttttattaacctttataataatagggtcaatattttctatcaactccaattttaaacaaaatgaagatgtagaatatactattgctaagattaattataataaaaatggagaaacctatggtacacatataatagactcaaatggaaattccattgaaccagaacttatacaaacaataggtagaggtaaaaaagtcggctacgtaaaaaaaagagatttgtacgattgtgataatcaaccaaagacaccagaagaagctgttttatatacaagaaaaagaaattttaatatatttaaaaaaacaatccctctttatgataaagaaggtataaaaattataggaagatttgaaatcaattaaaagacaaaaactgatagaattatttcctatcagtttttatttgtatctttagaatttattgttttagataaagaaaaaatcaaattaataatgtgaggtgaaaacttatgccaattaattcttttgaaaattatcctatgaactggaaaccaaagagaccttcaaaagggcaaatattatataaggcgcttgcagaacaactagaacaagatatcaacaatggatttttattaccaggtactaaattaccaccccaacgtgaattggcagatttcttagatgttaatgtgagtactatctctagagcttttaaaatttgtgaaaaaaaaggtctaataagtggagttacaggaagtggaacttttgtatcttatgatacgcgttcaaatctattcttgatgtccagtaataataaaattacatttattgaaatgggcacaatgaatccagatttcacactagaagaaatgaatactttgtttaaacatataattaaggaaatagattttaaaactatattccaatatggacaaagagatggtgctaaatggcaaaaagaagctattgccaaattaatttataaagctgggcttgaaactacatcagatagcttacttcctgcaagtggtggacaaaatgcaattgttgctattttagctggtttgtttcaacatggagatagaataggtgtagacccattaacttatcctggaataaagacagcagctaaaatgcttgggattcaactaattccaattaaacaagaagataatgagattagtgaagaaggactattatatgcttgtaaaaatgaaaatattaaaggtctatacataataccagattatcaaaatccaactacacatataatgtcacaaaatggacgaaaaatgattgcaaatattgcatctaaatacaatttaattgttattgaggatgctattcatagtttacttaatgaaacacatttaaatccagtggcttcctatctgcccaatcaaacaatttatattacgagtttatcaaaaattattgcacctagtttacggctagcatatatctctacacctaaacagtatcgagaggcattatcaagcgcattatacaacattaatctatctcaatcttattttttaacagaaattgcttatcgcatgattacatcaggtgaagccgataaattaattaatgcacgccgtaaatctgcaagaagaagaaacaagattattaatcaatatttatctggatataatcttttgggaaatgaagaatgtatatttagatggttgattctacctgatggaataatggcagaaaaatttgagatacaagcacttaaagaaggtgtacaggtctatgcttctgaacgttttgctgttggaaaagaaaaaccaatttctgcaataagaatagctgtatgtgctacagaaagcacagaagaacttaaagctggtctgagcgtattaaaaagactattagaagagaaaaaataattgtattgcacacaatattttaattgtgtgtatttttttttgttgttaaaataaaattacaccagatagtaattaacttatagagattaatatgtattattacatcataataacaaatagataaaatttaataaccgtttaagattatttatttgttgtatagtattttatatattaatccaaatttatttttaattataattgcaattatacaattaatctatttttctgttttactaatactttaatacatttaatacaaaaggagtgatttattgtggaaagaactcaacaattaaaagaaagctttattgcttcaattcctatattcttaggttatatacctataggtatagtaggaggaatactattacaaaaatctggtctttcaccttttcaaatagcactaatggtaactttagtatttggaggaagttctcaattcattgcagcttcaatgatttctactggtgcaagtgtaacatctattgttttgactacatttatagttaacttaagacattttctaatgagttctaatttgaacatgtacataaaaaataaaagtccaaaatttatattgccattttgtcatactataacagatgaaacttttgcagttaattatgaaaaatttactgctggaaattggtctgatagaaatgctatttatcttaatttcttctgcttaatttcatcagttttagctaattttattggagcatttttaggagaaagtatatctatagacagttctatttctggcttcatattgacttctatgtttatagctttaatagtttctcaaataaaaaataagatttatattgtagtatttatatcatcaatcattatttctgttattttatatgcattattcaaaagcaatttagtaataatagttgcatcaattttagcatctttaattggtttctttatagaagaatcttactgtaaaaaggaggaatcttatgaataataattatatattttttattataattggaatgtacattgttacatatctaccaagagtgcttcctatgttaattttttcaaaaaaagagatgcctgattttttgaaaaaaatcatgaaatttatacctgtagcaatacttacttccttaactgctaaagatgtattttttaatggagatagtctatatttatctatagctaaccctaaaattatatcttttatgattgtacttcttgttgcatataagtttaaatctattggtatttctattattacaggagtgatatctatatatttatttggaattatcttgtgatatttggataatgttttattgtataagttattttaaaactatgtgtacaattttaatttaagttgttatattattgattttaaataaaaaacagagtgacttaaagttactctgtttttactcttcattctctactgtaaatattctaatatattataataaaagctttcgacagtaaaaaaaatatatatacttaaatactatctcattccatatttgttatttcttcttcatatttttgaaactctaaatttgctttaaataaatctccatctatttctatataaaattttccaccttgtaaagctactaaatctcttgcaatagcaagccctaatccacttccttcagtattccttgattcatcagctcttttaaatctttccataatctcacttgggtcaaaatttaattcataagaagatatatttttcatagttacctttacattttcaccatagtcatatacatcaatatagactctagtttcttctaaggaatattttgctatattagataaaagattttcaaatactctatacattcttcttccatctgcccatatatacaccttatcatttggaacatttaattttaaatataaattatttttagataatttttcttcaagttcacctatgctttgtcttaatagttgcactaaatcaatcttgctaatttgtaattctatattgccactacttactctactcgcttcaaataaatcttctatcaataattttagtctttttgactttgactcaagtacctttatataatcatttatatactctggttgtattgattcttcttttttaattaaatctacataatttattatagaagtaagtggagttttcaaatcatgagatacatttgttataagatcagacttcattctttcactttttacttgctcttctatagctctatcaagaccttctccaatattatttatattttcagctaaagacgtaaaattatcattcccagtaatttttatcttataatctaattctcccttttttattctttctgtaccttctattacgtaactaagatatgaaagtcttttagttatatatattgtaaatcctaaaaaaatacatatagaaaacagtaatcccatacctatacttcgagtgctaattaccatgattaaagctaaagatattatcactataacaataactttccttgctaaagatactttctttatagcgttactgacctcccttacagtttttattaaccataaaatcactcttactataatacttgtcttaaatatacacattttattttctaaataactcaattgcacatttataaaaaatatattatttgatactatcagtaaagataaagaaactaatacaattacatcaatatgataagatacagcaagagcatacatagttaaaattgcaattgaaataaatactagtattacattaaattccataggtatcttactgtatattagtaaaaatacattatttctttttaaaacttcaccttttattctgctatataaaatgatagataataaacacacaattgctaaacttaaacaagctacaaaaaataatcttactttttctgtagcttgtttaaatatttgaaaattagtgtatactattccatcttctatagttggctcttctggaaaagagacatatgcctcaaaggcttcatctactccatttagttccatactcagattattcagttcaaatttttctccatttattgttttaatatacgagctctttcctacattatttattatctctatattacaatagctcttagttttttgtttaaaatcatctaaattaccatatgatgtatttgtataaaatactcctgtatatgtattaataacatacacttttatattttttagataacttaaatattcttcagaagcttgtttattaatcatgattttatcatactcagaatcattactacttaaatctatacttttactttttgtttggagtttacttttttcttcactagttaactgactatccacagatatcttaaaattagataataagctttccactgttccttcatcaaatatattactatcataaaaatcattagatatattaaaaatcccactctttgtagaagttttttgtatattgtatttaggctcagcaagtcctattgtagccaacaatatagttaatggaaatgagatagatattatgattaatgaaactaattttaatgctctatatttttccaagttgcccacctcatctacattgtcagtattttatataaaataaagtttaagaaaagcataatccccatagagtaaattaaactctcagagaaaaaattaaaacatattaaaattcctaacatttgtgtaaatgtaaaaatgactaaaatcaaaatgcaattaaatattaaactcttttcttttataatttttccactaaaatttttcaatcttataaccaactccccacaccacctttaaaaatcttggttcttttggatttatttcaatcttttctcttattcgtctgatatgtactgctactgtattttctgaattaaaactttcctcattccatactttttcgtatatctcatctattgagaaaactcgtcctttattttctaaaagaagttcaattattttatactcaattggggtcatttttatgttttcaccatcaattttaacttcttttgttagtgtatttaactccaaagctccactttttaaaatttctttacatgtatcttcataattacctaaagttacatatcgtcttaagtttgatttaaccctagctataagctctaatagattaaatggctttgttatataatcatcagctccaatatttaatcctattattttatctgtatcttcactttttgctgaaattaaaattattggaatatttctttcttctcgtatttttacagttgctttgattccatctaatttaggcatcattatatccattagtattagatgaatgtcattctctgttattatttccaaagctttcattccatcatatgctttatatattttaaatccttctgatttaagatatatttctattgaatcaacaatttctttatcatcgtctactactaatatattgtacatattttcacttcctctattgtataataatacttatctatattatacaatatctttcacttactttctcaacaatgactaaattgttatattactttggcttacatttttgtaactttcccttataactatataataaaatataaatcttaagaaaatattatcctaattcttaaatatttcttaagatttaagataaattgagatttatttgaataaattgatttgaattatgttattttcagattacttttatttaagtattttgattggattcagctgaattaatgtatattaattcttattgaacagtttttatttttggggtggaagaatggtggaagaattacatttcactaattttcttccaccattcttccacccaaatatacttagaaacatttatttcactgcaataatagctacttatttaaattctatttttatacattctatctactatatactgtacatattctattaaaatttatataaataaaatacaaacttatttcatttttttaacatgttcagaataataaacaaaatgaatgtagaaaaagttataatttcataccttcattttatttattatgtatctagctgtcattttcttattttaaattcttaaaatattcttctaataaatttaaaatatcaccatctacttcatcatccttactacatagtgctgacattaaacttaatattgaatttttatgtgtattctttaaaaattcttttgtttaaaatctctgatattatttttcttttactaatacattatagtgtgtacgcttatctattttctccgtttctaaaaactctcttctttagtaatctttttaatactgtaaatatagttgtatctttccattcatatttttgttccatagacttggtgatttctcttgatattaataccttttctgattcccaaatatatctcataacttttaattccgcttctggtaatttactaattttcatagtatacatccctttaccaatttatgtatatgttaaattctatatcaataaagttttacaaacaaaagaattaaggtaaataattacattcgatttttactatatcattcttttaaatttctataatactcatctaataggtctaacttctctttacttacatttttatgtgtagtggtaagtgaacgcattatttttatgcttttactagattttagtacctttttcttaaaagtataatattctttattatctattattattttataatgatattgaaaatttataatatatctagccaaataccttttagcaactagcctttttagtagtatttttattgtacttttatgccatccataaatctgttttatttcttttacaatttcttttttaggcattagagtgtcttttttacataaatactccattactattaattctgctcttaataatttttctattaatatttcttctttcaatttatgtcacttccttaattcttctaacttaaattaataataggagctttttaagacaaaaactagaggtaagttttaccaaatattctacatatttagtctgtttttttaaacgtaaaataatattcatatatatatatttgtttaatttgcaaacaatgctaccaaacaataaatagctctattgtattattttagttgtagaatagcactaaatcgttagaatcaaagaaatttagtagcacaaaactatataggctaatgcttataaaataaattataagttatgttaacaagttactaaaagcatattttatttttgtttttatgaaagttttttaggtatgtaataatatatatcttttaaaaatatgtattcatgtatacatattttgacttattatactgataattcatataattattttgattttatagatacacagttagatgattttataatagagcataaaaaaaatgtagtataatcttgtttatatcaagttatggtattggtaagtaagtataattaaatagacattattttctgggtcctctttttattttcatctgcttttaaataatattattgacattgatatgactgtagttttctttattttaatccattgcttatatcttttctaacaagaaatgtcattttaaatcatttctataaattgtaaaataatagtatatttgtcatagaaagtgatttttttgtctatatatggtaaaatatagaaagtagaaatcaacaaaataaaaatttatatattattaattttatatggaggggaaataaatgaaaaataaaaaaggatttactctagtggaattattagtagtaattgctataataggaatattggcaataatagcacttccagcattatttaaaaatatagaaaaagcaaagatagctaaacttgaagctgatataagtgcaataaaaagtgcatctcttagttactatgctgatgaatccaagtatactgatggaggaatgatatcatgggtaaagaaagatggaaaaataataataaatgggggttttaaagatgacccattagcagataaaatagaaaatttagggatgccttataatggttcatatctgttaatgtcatctcctggtcatgaaaaatatctagaattaagcatacttccagaaggagaaataagcaaaagtggtctagataaattaaaaaatgattatggaaatttaatagacataacgaacgatcaaaataaaataaatattgtaataaaacttttaaataataaatcgaatacttaaatacaataaatttgatttaataattactgatgaaataaacaatcttgtttggagaaatgaaaaaagcactccccaagaatagaatgcttagttataactacagaagtgtattggcatacacttctattttttattatatcacataatttatgttgctaaaaatacctatttaagttgtttttaaattgtgttgagtaatattcttgatagtttatacattaatgaatttcaaaaaaataagcactctttataataaaaagtactttagtgtatgttaatgtcctatctaataaaattgtaacatgtcttatgctttagtatgataattttcattctctttattgttgcaacttatactatagttttgctaatttatctgcaaacacaacttctttattgcatgtgtatcaaccaaaaacatcagaatacttacttaatacatctgcaaaatcgtatctttcatctatagtattcttatttgacaatataacaaaaaatgaatcgagatatgccttttttataattagatatattttataaattctagcatatcatttgttattttctgatatgctattgatgttttaaatcttctatttattttattattttttacttttccaattgtacctttataggagttatatttatgtgatttatgaaaaaatgctatgcatttaagttctaattttttgataatacatctaactttcttttgattaataatgataccactatttttaatgtggcttccctgaggcacacatcttttttaaaaactcaagctcatcttttaaaaatttattttcatattctaattcttgttctcttgttaatttattttttctttagtgtttttgtttttattcattatggtcttcctttcattttgaaaaaggcatcaacaccactatgtaaaaatttttgttttcatgttgctataactgtgctattgtttattccaaaatacttagcgatttattgtacactatacttagttatcatcatatagtttataacatctaacttgaaccatatagtatagaaaacttttttatttttagtgcaccctctcctaatatattaacccatctttcaacttgagaatggtcataaactccatattgttttactattaaaatatctcttccttctctattcaaataaaatttagctacttttaatttgaaattaaaatcatatttagtcatacataaacatctcaagcgttagatttttactctaacaattatggtgcagtacaaatattgtataatactgattttctattgacaaaagaatataaaagagatatatttgtattataaagatacaaatatatctcttttaaaattactaaggaggataaaaaatgattcaaaaaaaaatttttatgggtttttgtggtttccttggatttttaagtcttagatatttttcatctggcaatgttactgatcttacatatattggattttttgcttttttctcaaactttattatagcaaaaataaatggtgataaagcagatgaaaggtatgtacaagatgaaaaagcagctatggcatttacaggacagcttgctattatagaattattcattttatggtgtattactatagtgtctaggaatgtagaattaatgtgtgttttactatcaattacatatgcaatcactttaaatgtttatgctataaaactttatattttagaggaaaaataatatgcccaaattcatttgtaacctaaaaaaatatagacaattaaaagaattaactcaagaacaattagcagaaaaagtaggagttagaagagaaaccattatgcgtttagaagcaggaaagtataatccttctttgaaattagcaatagatatatcaaaaatagtagatacacctattgatgaattgtttatttttgattagtttttgcattattaaaaatgtgttttaaatacaaacttaaattcaatctttaagtcactcctgactgaactatacccactgttttatacagttaaaacatgtaaaagtggttataaagtactagtgtcaatcattagtactttttttattatattcatataattaatagctatattttaaagtttactatctaaaaaatagcacgtcaaataaaaccctagatatttaaatttttttagagctacttaaaataaattatgctatctctgtacttaaatatttcctaaattcaagtggagacatagaatttaatctcttttgatatctaaaattattatagtaatatatataatcatctattgctttgactaattgttcgtatgtatcaaatttccttaaatagtacatttccacttttaaaattcccaaaaatccttccataggagcattgtcaatacaatgaccaactctcgacatactttgtatcatgccttgtgttaaaagttttgatttaaacaccctgctagtatactgatagcctctatcactatgaaagataggttttgcatttggatatacttctattgctttattaaaagtttcgaatactaagttattgttatttgattttccaataacatatgaaactatgcttctatcacctaaatccagaattgcacttaaataagcctttgtcccgttggttaatttaaattcagttacatctgttaaccatttttgagaagttttatctgcactaaattttctatttaatacattttcagcaattacttctggtgtacatttaacataactaaatttcttttttctacaaatagaccttaagcctacggctctcattagtctgtaaactctcttgtgattgacattaagtttatactctctgtttaactgcaaggtcatccttaaagagcaaaaaactcccttcttttcttcatatatattagttatcaaagttgctaatttaatgttttcaagttctaaattacttttatctcgattgagccatttatagtatccagaacgatttactttagcgatttcacataattgcataagcgaagcttttttttcattgaataaggattgaatagctttatatttattttcattcttggatagtgtaattaccaccctctttctatgttttttaacttttttaagaatgcattctccagttgtaatttgtgtttttctgcttttacaattttcaattccaactttatttcatctaattgagttaactcatcttctttttttgctttacctcttcggtcttctaaaccaactataccattttctttatatttaagagtccatcttctaacttggctgtatgaaacaaagtatttttttgctattaaattgtaattaaaatcatgctcaatacaatctttaacaatttcaaccctttcatctaatgttgtttttctagtctccataaagagtcctcccttcggggtttcttttatctccttatgaagattatactccttaacccaagcttttagtggattaacagacctcattttatatttttttgagatagtgtcataagatccttccccatttagataagattctatagcatttaatttaaactctttagaatagcatgatttgtgactttgttttattaaaccatcatttccaaaagtttcataatttcgcatccactctctgaatgtacgttttccaatatttaattcttccattatttttattactgaattttcaccctttaaatatgattcaattgcttcgattttttgctctgatgatactttagttttagacataacaaaaccctcctagttttagacagttttacatatttcaactgtctcctaagaggggtatagttcagacagaggggctttttattttttcaaataatttaacgttcatatataaatttattaatttttcagctagatatgttgaataatagctaattctattgtattattaatctgtagaataaaactaaatcggcaaaactagagaaatttagtgacgcaaagctatagggactaacgcttataaaataagttatgtcagccagttgccaaaaagatattttctttttgtttttcatgaaagttttttagggggataaatacattatgtttagagataaaatggataaatgtacacatatgctaactgcttatattggtagttcatatgattattgtgattttatagatacacagttagatgattttatattagagtacggagaaaaagttgtggaatcttgcttgcatcaagtgatggtattggtaagtaagtataattagacagattttcttctagaaaaccctttttagttttatctacatttacattaatatattggtaatataaaatgtttaaatttattttcatattaagaataaataaaaatgttaactaaaaattataattaaatagacatttatgttaatctatgatataatagtatttgtggtaatacacaagtaaatcaagtatatcttgatataggttaataggagtatttttaatgaataatggaatagtaaaatggtttaataatgaaaaaggatttggatttatatcaatggaaagtggagatgacgtatttgctcatttctcagctatacaaacttcaggatttaaatcattagaagaaggtcaaaaagtaagctttgatatagttaaaggcgctagaggtcctcaagcagaaaatataactatattataatatatagatttttcggaaagactcttttaagagtcttttttttatttacgcattttgtaaaaaaggaaaaaataacttcaacaagaaaatacttaaaaataatacttagtctaaatactttttataaaataaatctgacaaaaatatatttataaagtatgtacttaaacctacaagtactcttttaattagaatatatagtaatataataattttagttgtggcacatcaaaattttcaactatctcataaatacatactctttcttttgtattcaattctgatataacacttttagtaatttgttaataaaaagcaattaaaacatatctatatgtttcaatgttctattttttcactgaaatataataaatataaaattagttaaaaagtaaaaaatctacaataagttaatttgatttaagtttttaaatttaaaatactttaaagtattaataaaaattaaaaataaaataactacctatggaaatgacattataaatagattttttcttaactatacataataaaacataacaaaacattataaaacataacaaaaacttagacatcgttttcttagtatgatatactaaaaaagaatttacactaatttactaagggggaatatcttatgtttaaaaaactttcagtactagctttagctatgattatttcattaagtattactgcatgtaattctaaagaaaacaaagctaatgatgaatctaatactaaagtgacaacagctgatgattcaaaagaaaaagagactctttttgtctattcaggggcaggtttaaagaaaccaatggatgaaatagcaaaaaaatttgagaaagaaaataatgtcaaagttgaatatagctatgcaggttctgcacagctaatagctcaaattgagacaagtcacaaaggagacgtatttattgttggttctgaaccaatttattcaaaggcctttgaaaaagaacttgtaggtgaacataaaacggttgcacatcatacacctgcaatagttgtacctaaaggaaatccagctaatattcaaaaattggaagacttaaataaagatggagttaaacttattttgggagacaaagagtctaatgctataggtaagactacacaaaaaatacttgaaaaaaataatttaaaatctataaatgataatgttgtctctacagctgcaactgtaaatgaaatgattgtacagttaacatcaagtaaagctgatgctacaatagccacaaaagattcggtctttggcaatgaagatgtagaagttatagaaattgcccaagataaaaatatagaccaactcatatcagcaggaatcgtaaactatagtgataaaaaagatttagctaataaatttataaattatatagagtcagatgaagctaaacagatatttaaaaaatatggttttgaacctgttaagtagtgattaaacttgaaaaataaattttttactacactacttactggattttttgctatagtctttttttttattgtatcaccacttcttatgttaatcattaaagggataagttatgttcctatatgcttaaaatccgtggaagtacagtatgcaataacacttagtattaaaacatctttaatatctactatagtatgccttttattagctattccagtagcatattttttacatattactaaattaccatttaaaaaactgattatacagataataaatctccctatgtctcttccacacttagtatcaggaattgctcttttacttttgtttggaagaatggggattggagattccatttataagatttttaagcttgattttatatttacaaagcaaggtatagttttagcacaagtatttgtaaatcttccacttactattaaaatacttcacacttcactaaatgaaagtaatgaaaagatgatatttgttgcacgtacccttggatgtaatagttgggaagcatttagatttataattcttccaaatctaaaaactggaatcatatctgcaactgtaatgacttggtcaagagcacttggtgaatttggtgcagtagctatgatagcaggttctacacgtatgaaaactgaaattattcctacatctatatatttaaatatgtctactggtgatatagacattgcaatcggaatagctgtaattttgatatttatctcacttacatgcttgatgctttttgagatattttttaatagagaggttgataagaattaatatgttaaaaataaaaaatttatctcttgatttacctaattttaaattacaagaaaatagtttaaatattaataatcatgaatactttgttttattaggagctagtgggtcaggtaaaactctattcctagaaacattagcaggaagatatccatctgctaaaggaaatgtatcatacaaagaaaatttaatatcaaacttacctccagaaaatagaaatataggatttgtatatcaaaattttgaattatttccaaatatgaatgttgaagataatataaggtttccacttaaattaagaaaaatacctatagatgaacagattcttaaggctaaccacttgtctaaattaatgcagatagaagatataaaaaataggtatcctaaaaatttaagtggaggcgaaaagcaacgagttgcttttgcacgtgccttaatagctgaacctgatatattacttttagatgaacctatgagttcattggattatattacaaaaaaacatataagcaaaattttgaaggatgtctacataaaatacaaaccaacagtgattcatgttactcatgatatttctgaagcaatgttttttgctcataagataggaataatgaacaatggaaaaataaatcatatttttgatttaaatgaagaaataaaaaataaaggagaatcttttttctatgaatatatttgatattttgagagattatctattagtacaagtcgataaatataatttaaatatggatatgataagtattgtgtccaaatctctatcttcaaaagaagcaattggaaatactaagcgtaaagatttcccaattatagttggtaaagaaataatgcttgaagctgactttaaaggagctaaaggacaagcatttacttctactccatctacatttgaaggttctttaaaagacatattatcattagatttacatgacaatcctcatgatagaagtctttttatagcatcattaaatgcagttatgaaatacttaggcaagacggatagaaccattcattgtaaaaataacgagccagaggtatgtgcaaaaaaattccctgagtttataaaaatggaatttggtaatccaaaagtagcaattataggatatcaaccagccataattgataatattaaggactttttcgaaacaagagtattagatttaaatcctgaatttgtggatactattcaatataatgttaagattgaagatggtatacgagattatgaagatgtaatatcttgggctgatttagtgatttgcacaggaagtacattatgtaataactcaattataaattttctatcacttaacaaaccagtttactattatggaactacgatagctggtgcatcaaatattttaggtttaaaaagactctgtttttgtagtaaataagcaatcatatcatcaaggagtacacaaatatatatgtgtactctttaaatttaaaaagttattacttttattctaagtactaaagtaaaattctattaaaatgaatcccgaataaatgtacaatccctttaaatctcaattcctatcaattattaatattttgattagtcttatacataaatgttttctttattttaaactaataaaaaaaattttattccattaatctactctatatttttcagcatttaagaaataatttttagtactttgtttgataatataactaagacaacttttcaggagatgattaaatgacatttaagaataaaaaatttactataaataaatatgaaattctatctattattctagttttatgcttgattttaaccggttttagtagctatgtgaattatagtcataaaaaatttaaagattatgttgtcttctatgttcagcatcaagatgatgaagtgttgtgggctgggagtgctattgttaatgctataaaagaaagaggaaaaaatcatgtatttgtagttttagtatctactggatgtggtatatccgtctttgataaatataaaaaatatgaaaacctaacaaatatacaaaaatcagaatatagaaatagagaatttttagcttctcttaatagccttggtgtaataagggaaaatataatattattaccagaaacaaatacaaatggtaatactgacttcaattacatggaaaaaattgctcttacatttgaagaaaaatttaaaaatgtaactcatatagcacatacttataagttagatgaccatttacaacatttaaaaaatggttctgttatccaaaatttatataatgttggtaaaataaaagatgctaaatattttgtaaaacctaaatttgctgataaaataacttttaataataagatagtttataaagctcattctactgaagactatgaaaaggttaaaaatgcctgtcaacaatacaaaattgttgatgaattagaatatagagaaggtattggctataagtctgaccataaatcatttgataagttattaaataataaagatgttcctgctatacttcatacacctaatttataagaaatatttattcttttaatttaagttataagaaggaaattatttgagattttgtgatatagcactttttgtgctatactactttttctcattcaactattacccatatctaatttcatcatctcttaaaatatataaagatatcatcattaaaacctataagccttattaaatactttatacatatctacattaaactacctatttatattaaactacattaaaataaatatttgttataaattcttaataattatgaaactcatttgttatttatatttgttaatatatgtttaaacctaaaaaattaataaacccaaaataacataaggagtgtgatagattaccctagatattttcataaacttttaccttcagattaatatgggcgtctatacttttaaatttactatatgcattgacaatatattaaaagtactagtttttatttcataatgaacgggcttactgttttctaatacctctttttggtataaaataaaaattggttaaaaataaaatttcaagggggttaataaattgaatcaaaatatattggttgtagatgatgatagagagatagttgatgctatagagttctatttgagacctgataactttaatgttttaaaggcatatgatggacttgaagcattggacatactaatcgaaaatgatattaagttaataataatggatgtaatgatgcccaatttagatgggcttaaaactacacttaaaataagagaaaaaaggaatataccaataattctcttatctgcaaaatcagaagatatggacaaaattataggtcttaatatgggtgctgatgactatataactaaaccatttaatccactagaacttactgctcgagtaaaatctcaacttagaaggtatataaatttaggtgattttagtaatacaaataactcaaatgatactaattatattctaaaaagtggtggcctagagctaaatacagatacaaaaatagtttctttagatggtgaggaaattaaaatgacaccacttgaatataaaatacttacacttcttatgtcacgaaaaggtaaaattttctcttcccgtgaaatttatgaaaatgtctggaatgaagatgcttatagttgtgagagaactattgctgttcatattagaagaattagagaaaaaattgaaattaatccaaaagaaccaaaatatttaaaggtggtgtggggcattggttacaaaattgaaaaacttaattattaatgattctaaagcaaaatttattttattattattactgtttctattagtttctatattatttgaagcagtttatgatttgaataataacttttcttataatattaattgttattataaagagtttgctctcccttatttttattttttcggtactcctgtacatttgtcaaaagtagaattagagtttgtctgcataggtattatattatcaagttttttattgactatactatgttttacattgtataaaaaaaataaacagactaaagtcaaattcttagagaatgtcataagccttttttctaaggtaaaaatagaacttacacttatattaactttgatactattaaccttaaggtttcatgcatttacaagtaataaaatgttttacaacactaatttaataatctacaattttataattatatctatagtctatataatatatgaaaatattaaatataataactataatctaaaagatatgtctataacatatgtattcttttcaaacttacttagtatgtataataaaaaaactataaataaaaaattagctatagtatttttaatatctatagttgtacaagctattatccaatatcttgttttgatattctttatgtatatatattattctgaggcaatagctatagtaattttatttacacttgtaaacacagtttttcatttttatatatacaactttttatctgttaagtttaattacataaataacatatcaaaaaatataaaaaatatagaaaatggcaatttaaagtataaattagaagttataggagatgatgaaatatctactttagccaaaagtataaataatataacaggtggtcttgaaactgctgtagatgctaatataaaaaatgaaaggatgaaggcagagcttatcacaaacgtatctcatgacttaaaaactccacttacatctatattaagctatgttgatatgttaaaaaataatgactttgacagagagactataaatgactatataaatattttagataaaaaatcacaaagattaaaattattaatagatgacatatttgaagcatctaagctaagtagtggagatgtagaatttaatataacaaaaaccgatataagagaacttttaattcaaagtattgtagagtttgaagacaaaattcaaaatagcagtttagattttataatagaaacacctgaatatgctgtttttaccatgatagatggtaaaaaaacttggagagtttttgagaatctaatttgcaatatactaaaatactctatgcctaacactagggtctatatagatatgtttataaaggaagaaaatataatattaacgtttaaaaatatttcaaatgataaactaaatctaaagccagaagagttaatagaaagatttagaaggggtgatatatctagaaaaacagatggctctggtcttggtttatcaattgctcaaaatataattgaattagaaaatgcacacatggaaataattatagatgctgatttatttaaggtaatgcttacttttagaagagttaattgatatattaatataaaaatatattttaagttatttaaacaagaaaaaaacctccttagaggtctttttctaaatgttggggtttatatttacatattttttgattatacctttttggtgtgatattaatacattttaaattatatttctctataattcatcacatatttcatctctctgtatctataatatcacatagtgtttccataatcagttacatctctgttacctaagattacaattttgtaatatttgtaatcttaggtacaaatttacatttgttctttaatataaatatattctttctatttaccctaaagaccttttaaatcatatttttctaagaaaagttttaacttagaataaatttgttctgctccaccaattttatttgattcaatatttaaagctagtaatggttcatgtagtgatattctaagtaaaaaccatccatctccatttgattcatcacaattaactcttattccttcaaaattatttggtgctacagaccatccatcaatactcttaacatgagaatctaaatcttttaatatatcctctgcatatggtctaaaatcttctttgttaatgcctattctaacttctttctcttcttgagcttcttcaaggttttctatcaattcttctatagtctttccttccaaggatagctttgctacttttattaaaattttagctattaaatatgccccatcatctaagaaataattttcttttaaagcagcatgtccagacgtttctatagctaaatggcactcttcaccttcactattcaatcttatagcttcatttattacatttttatatcctcttttaaatctatgatgtcttccttgtaattcatttataaatttagcaagtccttcagaagtaatcgaatctgttactatagctgtttttggatgttcttctaatactattgatgatataacagctataagagcatttttatttattggtttgccatttttacctacaatagcagctctgtctacatctgtatcaaagattattcctaggttgctattattatccaacacagctttacatatgctttccattgcttctttgttttcgggattaggtatatgatttgggaacataccatctgggttcaaaaactgactgcctgtcgtatctgctcccagtatgtgtaaaactttttcagcaaagaatccaccagctccatttcctgcatcaaccaatatcttaagcccagaaaaaggcttttcataatttttacttgaatttacaccttttctaattttatctatcaataaattagaataatcttctattaaattttttactataacttcaccttttttatttacttcctcatagtctacactatcatttttaacagctatatccaacatctcttttatattagttttttctaaacctccactttctgtgaaaaactttaaaccattatagtaataaggtaagtgacttgctgtaatcataatcgccccatcagaattgtatccatccataatagttgtcataaacatagctggagttgtagcaatctcacaatcaattacattacaatcatcattagttaaagtttcaataacagtacttctaaattggcttcctgttatcctagaatcagttcctatggcaacagttactttatctttcttagtcttttcttttagccaaatatgaaacgctttagctattttttttacttcttctacagttaggttaacttctttagaatcattttcatacgctattcctctaatatcagtaccattttgtagtttatataggtctcccataaaaaattctccttactcaaccaaaatttttattaaatattataaaatttcttgtttccacctaaatttttactattaaacagaaacatattataattttattacatggttactttatactttcttttagttcttctattttatctttatatgaaattggaggcttatcattaaataaagctgaagtaccaacaacatatatatctacttttttaccattcataagtttaatagtatccttatttatatttccatcaacctctataaatggaggattatcataatcttttagtatctctgtaagtttatccaacttatccaatacagaaagattaaacttttgacctgcaaaccctggatttactgtcattactaagataccctcaactaaacttatatattcttctattttatccacacttgtttgagggcttattgctaacactggccctataccataatttcttaacttttgtatatcagcttttacatttgtacttgattctacatgaaaagaaatatattttggctttatataagacatcatatcaatatatttatctggagtttctgtggctaagtgtatgtctaaaggtattgttgtattttcacttattgattttaataactctggtcccatagccaagtttttaacaaatattccatccataacatcacaatgaagtaattttacacctgcttcttcaagagcttctaattcctcttttaacttcatttggtctgcacacattattgaagcacaaataatagacataacgctcccccttgttataaattatatattatatatatttataaattttctttttctatatcatcaatcatttgtaatcttcttgcatgtctttctccattataacttgaatttaaccattcttcaacaattctcattgctaatcctttcccaataactctttctcctaaacaaagtacatttgtattattgtgttctctagttgccttagctgaaaaacagtcagaaacaacagctgctctgattcctttaaacttatttgctgcaatagacatgcctattcctgttccacaacaaagtatgcctaaatcagattttttactttgaacattttgacttaccttttttgcatatattggaaaatctacactttcttttgaatttgtacccacatcttcaacttctatacctttatttattaaattttcctttatatattcctttaattcataaccaccatggtcacatccaatagatattttcattaaatagcacctctttttataatttttttgattactttcagactattttataattatcataaaaataaagtattgtaaaaataaagctgtcccattgtagaaatttctttctatttttaagacagctttaattgacttatgtcaaatcaatttgttatttagatatatttatatctataacaactcttttatattttttactatatcttctgtagttaaaccatagtgttttaataaatcagctggtgtacctgattgaccaaatacatctttaacaccaattcttctaactactacatctttagtttctgctaaagcttcacatacagctgaacctaaaccacctattatactgtgctcctctgctgtaactacttttccagttttcttagcagtttcttttattaatgcttcatctaatggttttattgtagatatattaacaacttctacatttataccttctttagcaagttcttctgctgcttctaaggcttttgctaccattattcctgtagctattactgttatgtcagaaccttctcttaaaacagttccttttcctatttcaaatttataattttcactgtttacatcaggagttgcagctctacctaatcttatataaacaggtccattataatcaatagatgcaagaatagcttgtcttgcttctaaagcatctgctggatttaatacaaccatatttggtatacctctcattagagatatatcctctatagcttgatggctaccaccatcttcacctactgttacacctgcatgagtagctgctatttttacatttaaatttggatatgctacagagtttcttatttgctcatagcctcttcctgctgcaaatattgcaaaagtactcgcaaaaggtatttttccacaagtagcaagacctgctgctgtaccaatcatgtcaccttctgctatccccatgtcaaaaaatctatctggggcaacttctttaaatgatatactttttgtagcttttcctaaatctgcatctaatactactatatctttattttctgcaagttcttttaacacttgtccgtaagcttctctagttgctattcccattcctatagacctccttctaaatctttcaatgcttgctctgcttgttctgcatttggagctgttccatgccatgcagcattattttccataaatgaaacacctttaccttttactgttttagctattattacagttggttttcctgtaacttttttagcttcatcaactgcatttcctatttcttcaaaagaatgtccatttattactattacattccatccaaaagatttgaatttgtcatctactggatttacattcattacttcttcattagaaccatctatttgtaatccatttaagtcaacaaatgcaattaaattatctaatttgtaatgtgatgctgtcattgcagcttcccatatttgaccttcttggatttctccatcacctaatatagtatatactgtatagtctttgttatctaattttcctgcaagtgccataccatttgctgcagatagcccttgaccaagagaaccagtagacatatcgattcctgctacttttttcatgtctgggtgaccttgtaacttagaaccaaattttcttagtgttattaattcttcttctgggaaaaatcctttttctgctaatgtagcatataaagctggtgctgcatgaccttttgatagaacaaatctatctctatcagccatttttggattttctgcacatacgttcatcttatcaaaatataatactgtcaacatatcagctattgataatgaaccacctggatgtccgcttttagcttctgcaaccatttttattatgttttttctaatattattagaatgatctctaagagtgctcatactttcttcctcctgttattttttaagaccttacatttttttatcctacagtagattttacaattttttttaaaataatacaaatgtttttttaagattttactgctacttttatttcttccccgttcattaaagctgtaataccttctttaaattcgtctaaaccaacagttctagtaactaaagcttctgtatttactttcccacttgccattaaatctaatgctgtaatccaagaacttggcttttgagatctacttcctatatattgtaactctctttggattattgcttcttggtccatttcatttaattttttagcaaagattccaacttgtacgaaagtacctttttttctaagcagtcttaaggcttcgttaactgctggcataaacccagaacaatcaaatcctttgtttactccatttccatcagtcatttcattcactacatctgccaaactttcttccattacatttacagttctatctactccaagatttttagctatttctaatctttccttatcttttgtaacaccagacattataactgtagcaccttgagatttaacaacttgagctaataataaaccaattggccctggtcctattattaaaactgtatcagaactttctatagtagtcttttcaagagctgcatgaacacaacaagctagtggctctgtaagggctgctgataataaagatacattttcaggaagtacatgtatgctttcttctcttgatagtacatactcagcaaaacttccatttacttgagtaccaataccttttctagttgggcataagttataatctttagtttcacaatatatacatttctcacaagttgcaaaagtagtttctgatgtaactctatctcctacttttatatctttaacatcttctcctacttctacaacaattccagaaaattcatgacctaatgttactggggcttttatatttgcatattcacctttaaatgaatgtatatctgaaccacatataccactatattctacttttattttaaccttgtctcctgtagcttttggttcttctacttctaaaacttctacattatcatagcctggtttagttttaactactgctttcattatttttcaaccccttgtggtaaaattaatattttgttaaattcttcttttctatctcttatcatttcaaatgctttgtaagtatcttcaagtgagaatctatgagataccatttcttttaattttatctttccttcattaactagattgattcccttagtccattcttgtcctggaaatggtgcagaataagagttccaaaaaccttttaattctagttcttttctaaatatattttcaaatgcttcttctgataaagttatatctgaatatgctatccctaaaaatcctatcttacttttctttttagttataagtaaacattgttcttgagttatttttgaacctgcacattcaagagctatgtcaacgccttttccaccagtaagttcttttattttttctactgggtcaatatctttagcattgattattatatcagcccctaattcctttgattctcttaatttattatcagatatatcaactgctataattgttcctgctcctgctattttaagtccttgtattaccaactgccccattgttccactacccattacggctacagcgtctccaacttgaacacctatattaagtactccatgcatagcaactgctagtggctctatcattgcagcatcttcaaagtccatatctcctattggaagtacatttgtagcttttatatttacatactctgcaaaagctccaaaacttttagctcctaacattccatggtcatcacacaatgaaaataatcctcttttacaatattcacattcattacaaggtataaaaggaattgcaactactctatctccaacttttacattttttacatccttaccaacttcagcaattactccagaaaactcatgtcctggtatagctggaactggatatttccaatgttttaatactcttggaggatctgacccacatattcctgctgccataacttttatttttacttcatcactttcacatggttttatttctatatcttcaaatctcatatcatttgtgccatgtaatactgctgctttcacgataaatctcctcctcttgtattttgtatttttaaaaatttataaaaaatattactcttttttagtagctgctaaatgttaaattttcgcatactttactaaaaaagagtaatctctattaactacatattagaatattccaaatgaagaaactaattgagataatttcaatattccccattttagcaagtttccacctgtatctatacttgtaaccattgttgttccttctggcatcatatttgcttgttgtaataattgtgtatgaacatctgcaaagtttgtagccatataaagtgatatagctattactattgttcctgttataactgattgaactatattaccttttctaaagcacactataaatgccatataaaatggtattgtcgctaagtctccaaatggtaaaactttgtttcctggtagtataactgctaagaacaacgttataggaacaagtataagagctgttgatataactgctggatgtcccgttgctactgctgcatccagacctatataaagttctctgtctccatattttgcttgtaagaaatctcttattgattctgaaattggaattaaaccttccattaatattctaaccattctaggcataagtaacattactgcacccattgatatacctacattgaatattcctgctacatcatatcccgcaagtgctccaagtattatacctagtataatccccatcatcattggttctccaaatataccaaatcttttttgtatagagtctgggtctgcttgtattttatttattcctggtattttttcaacaaatttacctactaaatatccaagtggagcaaatgaagctgttgaaccagttggtaatgctataccttctaaatcataaaactcctgaacattttttgctgtcttttctgcaataaacagtactaataactccattagtattgcacagaatatagcccaaacataacttcctgttactatatatccaactgcacctgctactataaagtgccaataattccatatatcaacgtttaatatctttgttttattgaagtataataatagtaagtttactaataaacaaactggtattaatattggtgcaactggtgaagcccatgttgctgatgctgttgttggccaaccaacatctattactgttaaattaagtccgaatctttcaaccattccttgagccgctggccctagtgttgatgttaataggtttacaactaagtttatacccacaaatcctataccaattgtaagacctgactttaaagcttttgtaaacttaattctaaatatcattcctagtactacaattgttattggtagtattactgtcggtcccatatttaaaatgtattgtactactgctaataatttatccatttataaatcctcctttttctgttttataaaatattatttcaatgtatctatgataggattattttaaagcatctaatatttttttatctaatgctgctgtatttactccagttatatatgctgttgcttttattgctggtatattataagttgttggtagtatagttgttgatactattaaatctgctccttcttgctttgttgcacattcagctattttgcattgtataacttctgcttgtatattattttccttaactaatctctctaccttgtcacaaactactgttgatgttgctattcctgctccacatgctactaatatttttttcatttttatttcctcctaataatttttatttttatattttttatttttagtacttttttatttttataaagactttagtgtccttaaaacttcttctttatcagtagaactcatcaacttatcaactaactctttattttgcataattcccattaattctgttaatacagataattgactgtgtggttgattaagtcctaatatgaaagccaaatttacaggtactttttcatcttggtcttccatagaactaaatactactggttcattaaaagtacagactgatataaattgctctttaatatattctgcatctgtatgtggtattgctactccataatcacctaaatttaaacctgttggaaatacattttctcttgctaatattttttctccaaattcttcttttacaaagcctaaatcaaaaactttattatgtatttctttaaagaaatcttctttcgttttacaatccattttaaggtctataactttatcacttacaaaatttataaactccatatttacacctcctaattgcctttgtcttataccttagtttttcttgactttatataaagcatgttgcgtgccaaaaagtggctttttttgtgaaacaaaagaaaatgttttcccgaaaataatgctctcttccaggattttagctgactttcattgataaattttttttgatttttattttaatttttacttgttaatcacttaactagccatacttttttatattttttgtggttttttttgttagagaaatgatttttttgttttttacaaatggttttttatgtttaacaactattttataaaattatttattatgaatttaatttatttttatatattttttatatattctatattttataagaaatataggaaaaattttcatagaattgtccaataaaatttactttttacataaataaattcatatattttatttaccaagaaaaaagctaattctataaaatcatataaataaatttcatagaactagccttatatagagtaattaactacttagcaattgagtaattttaaattttatactaaagcaaatttttttgtctttcttctcggtactaataattagcttaaaagttcttttatttcatttttatcttcagtatttaataaaacttctaaagtatgctggtcattaatctttgaaaataagcttcgtatttctttcttattattttctttaagtgccagtagtaccaccaaatccaccataaatttattgtcccatactataggtttattcaaccttgcgattgctattgcaggctttataacgttttctggaagtccatgtggcacggctaccttagaggccattacaacacttcccattgcttctcttttatatacacttaatatatactttgaatcaacatatccaccttcttcaagttttgaaacaagagtatcaattatatactcctttgaaattccttcaaaattgtataaaatcaaatcttcatgtattaaattattcaactggttttcaatatttaaagctggttgtttactatttagatgctctaatactttattaataccatttttaccaagtacctcattataagaaataaaaggcacgtttttataatctatatcaatagttccacagatagcaataatattatattcagcttcaatatcatttaactcttcttctaaattattatttaaaaaagcaactggctttacttcaattaaagtgccatattccttaatttgtttttctatatgctcttttaaatttaaagctgtacctacaccactcaaacataaagtaatgattacatttttctttccatactcgttttttctgtaactaaatttatttgtatttatcatagcataattcttatttttctttaaatcagctattataccatctaaactttttccttcaatggttgcaagttttcctgcttccattgccaataatgtatctactctatttacagttttacatctaattccaagccttttttcaacctcatcaccaagaattaccaaagaacccatatcaattagaactagaataccttttctagcttctatcttttgaagctcttctaatacatgctctatcccctctgatggtgaatctgtaagtgctatttctatacctagtgtacattctatacctaaaatatgatttacaactttagacatttcaattccaactttaccatgcgtaactattactactttaactttatcttttatactttcctcattataacaaaatttatttatataataagccaaatatccaagctcatcttctggaaatgttacttgtgtcaaatcttctactatacccattatatatcttgacaactcatattccattggcattgatgcttttattttatctaaactcggatttattatagtttttccatcttttatcctacctatagcatgctcaatatgaattgctagagccaagtacagaccttgatttacatgcttaaactgctccttaataaatacaattaccttatccattatctccagtgtagactcttttaattgtcctccccagtctattcgacttcttctatcagataaatttttattgtttttaatagcattaaacttcttatctaacttttctataaatgcattttttaactcttcttctgaaaagcacttactttccaaaaccttaagctctttttctgcataattatatatctcgcttatctcattatcagataaaattctattttttccactcaccaattcactaatatctatatatatatcctcaactgaaaactcagaatacttttcatttttacaattacaatcataatatccactttttatataatcccttaaactatctaaatctataattaccttatcgctagaaaatatcgatttactaaaagctctagcacaagttacttgtatatcactctttaactgacctatatttccagtacacttataattcataagtgcacacataacttctttagttattataaaattcttgtttactcgctttgcttctctttcaaaaaactttattattatttcatatctttcagattttggtctttcactcatattaggtaaatttattaccattggtatacgtcttctaaatgtttgaagtaaattagaatctggattttctgttgtagcacttattatgagaacatttgcctttctattagaactactttctcctaaccttctaaattctcctctatctattaatgaaaataagatttcttgcccagcagcaggcaatctatgaatttcatctaaaaacaatattccattattagcttgttctacaagaccttctctatttgcatctgctcctgtatatgcaccttttactaccccaaagagttgagctatcaatagattaggattttctgcatagtctgcacagttaaacactataaatgggctgttctcttctttaatgttgttttttatagcatatttatacatacatgtagctaattcacttttacctactcctgtttctccatatattatagtatgaaggccattaggaggatacattattgctgacttagctagatttaccttttctttcaaacttccctttatacctatcaattcttcaaatccatcttcttctacaactttactcaccttcacatactttcctgatgatgctgggtctttatccttaatcccaatctttgactgatttaaattttcctcttttaataattttgaaactgcacttctcgatatattatatccattttctattaatatttcagttatttttctttcagacatttgaggattttcacttacaatttttgatatatcttttattaatattttttttcttctttctctcgaatctaaaatattattttttttcctaactgatatcacttcagacctagctacatttaacatttcagcaagttcttggtcagtatatggattttttttatcttctctttgtatctctcttaatattttatccatttttcgcctcctcacttaaaaaattaatctatttcaataatatgtttcaatatattatacaccaaaataagactaggcaaaatagcctagccttattacttagaatttccataataacctctttaatatacttataaagcgtagtttataattataattttaaaaaagcaccttcccaatccttcataaagctatctattcctttgtctgtcaaaggatgcttaatcatttggtttataactttaagaggaactgttgctatatctgctcccattctagcagcttgtaaaacatgtattggatttctaacactagcaactattatttgagcctcaatactatttacactaaatatatcaacgatttcttcaattaaatcaagaccattttgtgatatatcatccaatctaccaacaaaaggacttacatatgtagctccagctctagcagctaaaagagcttgtccagcagaaaatataagcgttacattagtctttatacctttacttgatagtactttcaccgcttttagaccttctgctgtcataggtatttttataactatatttttatgtatcttagataatttttctgcttcctctatcatacctttatgttctaaacttattacttctgcgcttattggcccatctactatttcacttatttctttaactacctctataaaatctctaccttctttagctattagagacggattagtagttacaccacatattacacctaaatcatttgcttcttttatttcttcaatattggctgtgtctataaaaaacctcataaaaaatcctccataattacatagttaaaatatgtgctaaacacaattatataatatcataaattacctaaattttacagttccattatctatagattcaactactgccaaagactctaatcttacatcattagcctttaaaagtgctcctccagcttgaaatcctttttcaatgacaattcctactccaactaagttagcttctgcttgctcaattaaatctttaagtccaagagcagctcttccatttgccaaaaaatcatccactatcaatatattttcgcctttgtttatgtactttttagaaactttaactgaatactctcttgccttagtaaatgaatatacattagtttcatatacatctttatccaaatttttagattctgatttttttgcaaatactacaggtgcattatcaaaatactgtgaaacaattgatgctatagctattcctgaagcctctattgtaaatatcttatccaccttttctcctttaaatctctctttaaattctcttcctatttcatttaaaaaagctacatcaatttgatggtttaaaaaactatcaacttttagtatatcatttcctgaaacactgccttctctcaatatcttttcttgtaaagccttcattgaacttccacctagccctttctaaaattatattaataaaaaaattatatttgttctaattttgctatctattcttgtaagtattttatattaaaatactaaaaaagctcctgtctatatcatagacaggagcttaaaattcaaagtaattaacttaatatataatttaaaataagtataaactatatcttcttcactcctgtagtcaagctattaatggtagcttagtagaaacatttgaaccatattatcaaacatatacaggtaaatatattaatttattccttttaattatatattataattctctattattcaacaaataattcaaactgtgtagaataatatattatagttactttatcagaactactttttttcaagtaaatttataaatttttcataaatatataacttttttcgatattatttaaaatttcttcgtcattgcttatattagctattttagcaacggctttttttaccccaatagactttatcaactcttgtaattctacactttgagtatcttcactattattataatgaagcgctgcacctattccaagaatcaaattgtcaactgataatccatatgattttgctgtcattaaaggtttaatcaatctatctttatcacttagttttcttaatggttcccttccgactcttaatacatcatcattaagatatggatttttaaatctatttaaaattttatcaatatatttatagtgcacttctgagtcaaaattgtattttttaatcaatccttctccactttctaccattgcacttttgactatatcacagataaatttatcttttatactctcttctatagtcttatatccttttaaatatcctatataagctgttatagcatgacctgtattcagtgtaaacaatttacgttctatataagccataaggttatcagctaaattcattccaactatagttggtatttcccctttaaatccttgtttttcaacattccactcataaaaattttcaactgttacatcaagaggattttcgtttttaccaggaggaactattctatcaactgaacagtttggaaaaccaacatacatctctaaatattctacttcttccttatttaaatacttaagtacctcttcttttaaagaagaacttgcgtatattgcattttcacatgctattatatttagattacttgttaatcccttttcttttctagcttttataccttttgcaattgtagaggctattttagtcaaaactaaaggtccaactgctgtagttattatttcagcctgtacaatctcatctattatttcttcttttatagatgaaaccgcacttatattatcaattacttcatctatacattctacatctcttatgtgtatagtatactttttatctttgtttattgagtttaatatctcctcatttacatcagcaaatactacatgataacccgacttaactaacaagcttccaataaaacctcttccaatatttcctgctccaaactgaatcgcctttttcattttaaatccctcctaagattagttggcaaaagcttccataaaagcttgtttgtcatttgaattttttagtctttctgttaagtcatcatctaaaactactgctatattagatagtatttctaaatgttcatctccaacaccagctattcctattaataaatatgctttttctccatcaaaatctataccattagggaattgtaatataactattccagaagataatatttctttttttgcttcatttacaccatgtggaatagcaactcccattcccatatatgtagtcattactttttctctttctaacattgctggtatatattcttcttttacatatccattttcaactaattttcttcctgctaaagttatagcttcttcctttgaaacactatctaaccctaaaaatatattattctcattcaatactttactcatagtatcaaccttcctttttaatattaattttatttatctataaatgcttttaatctgtttgtataaaaattaaaaactatatcttttacctctaatgtcatctcttctatagagaatttatttatcttattagtaaaaattatattgtctattaatgaaccacttatttcactcattatttgtctttgataacttggtgaatttttaggaagtaacataaaaactacattatcgatttcttcatttgaatctagcacgattctattctctagttttattattgataacttcataatatctattctttcactcatacaatgtaacaatagaatttttgattcttctatatatggaattgagatttttaatctttcttttaacgattcttttatagagattatatcttcactagattttgcaaatatttttgatgagtcttcaataagctcacttaaatctttactttcaaatttttcaaatctaatttcctctaaaaattgaagaatatcttttcctatattcatactttctgttatctgttcatatactttattcttacttttagtatcatttttcgcatttaaattgattaatttattttgagctatagattttattttttccttgattatctgttcatcatctaaactcataaatggacctacacatatataatttaaacttgtatttaactcaactgtagacactattaaatcaacatctttttcttttaaatactcttcatctatgtttatagctgatatggtttcaagtatatttaaattaggaaatttattttcaatcttagttgataagaatcttgaagtacctattccagtgggacatgccacaacaatatttatattagtattcatcataagatttttttctatggctgatgcaaagtgcattgcaatatatcctatttctgattcaggtattgaatttatatttagtttatcttttataattctagaaatcttttcaactccatcataggcatatgaatacttgctttttatttcatctaaaagaggatttcttatttctaatcccatattcaatctatttatagaaggccctaagtgatttgctaggtctttaaataacctctcgtcattttttaaacttattttaaattcatcttccgccaaatctatcatcttatttgtaatttccattatttctatatcatctaagtttaaagccttatggtttgaagatgacctttgctttgcacctcttatatgcatagttatatatccaacctcatctactggtatatccatgttaaaatctgtttccataccttttacgatttctttagctaatttaaactcttctgttatagataattcttttagaaactctttatccatagttatattttcaccattttttatcctctgtaaggctaatgaaatatgaactacaagccctatatatgcactatcagctaaatttacatctaaatctgaaagcttctttgttaatgtagcttcaacttttcttattatgcacctgtccattaaatttaaaagtctattttcacttaaaatttctattgctttatctgtttgtatattttcacttatatttctgaccatatctagtatttctttttcattgaatgaatcgtatataagatttacatatgcctctctaaagtttttttcttgaccttttaagtagacaccaagccctggttttctaacaagctcaatatcaaatctttccaaccatttacttgctaaggcaaaatcattattcagtaccccttcagatacctttaatatttttgcaaaataataggattttactggctcgttagaaactagtagctttgataatataattaaatttctttcttccttgctgtattctttttctattttttcttcttctaacaactcaattataaagttttgattttctatattttcctctaaaatcaatcccactcctggtttttttacaaagttaaaatcattttcatcaaaccatttttcaattccagacatatctctaagtacagttcttgaacttagctctaaagtccctgcaatctcagaaatagttattggaatgtttttctttgaattttctactatcattagtattatctttttttgcctagatgtaatcttcttttttttcaaattatccactcctaattagtggtactttttatttttatttagattctaatcttttaaataatgcatctaaatttgggtcatttaaaaaattgtttattgaaactatctcaacacttgaattattcttagcaactctttcaactaatgtattgtgagttactactatttgtgtatcatctggaagattatcaacagatgaatttgtaatttctatatttaagtctaagttttttattctatttttaaatctggaagctcccattgcactcgaacccattcctgcatcacatgcaaatacaatcttcttaatctcatttacttcaagctgtttttcctcaatatttttctcagagttcttacttgcagatttcatatcactcatttttgctttagcttcttctaaagaagtactgtcttcttcactttgatttgctgaagctctcttaacaaatggtgctgccactaagaatgatacaactgttgccactgcaactcctgctaatactggaagtaatcctccctttggagctagtgccataagtgcaaatatacttcctggtgatggtgctgctacaagcccagctcctaatattgaaaaagtcaatattcctgctgctccacctgccattgtagccaatattaaaactggattcattaaaatatatgggaagtaaatttcatggataccaccaaagaaatgtattattacagctcctggtgctgattgttttacacttcctctactaaacatccaatatgctaatagaactcctaaacctggtccagggttactttctagtaagaacattatagatttacctgcttcttttgcctcagctatacctataggccctaatataccatgatttattgcattgtttaagaataatacttttccaggttctataaatactgaaactagaggcaataaacttttgctaactataaattgaactccagattctataagagctgtccctgctactattgctggtccaattgcataaaatcctagtattgcaagaagcatacctattatacctattgaaaagttatttactaacatttcaaatcctgttggtatctttccatctacaaatttatcaaacttcttaattacccatcctgcaaatggtcccattatcattgctccgataaacattggtatatctgcaccaacaattactcccatagctgctgctgcacctattacgccacctctttgtcctgctattgctttaccaccagtataagctatcaatagtggtaaaaggtattttatcattgggtcgcctatagtactcaatttttcattaggcatccatcctgttggtataaataatgctgttataagaccccatgctataaaagctcctatatttggcattaccataccacttaaaaatttccctactcgctgtatagatgtctttattgtcgattgattagaactactcataattttacctcctcttgaattatattctatatcgatatgattcccttttgttatacttttattatagagtttatattttatagtaacaactttaagaaaccgtttctatgtcactttagataatgacatttgtcattttagtttttgtttaattttatttatgtagtattttggagtatatgattttgtaaataatactatttttataaaatatttaaatttaatagaaatgaaaataataattcagttaaataaatttattaaatgtacttttggatatactaatatagatttaatttatctgtatttttgaggtttatgcactctctagtaatattatcaatataaactatacaaatgtaattatatgaatcactaaagattaattttaaattagctactattaaacactaaacattatttaatatacaactttaccctataaggcaatatatattaaacaaatttaattaaaatagtttaaatttttcaaaaatctcaatatttgacaaaatactttaataaaattaaagaataagttataattaatactatcaattataaaaagtataaaaatataaggagtgattaaaaaatggcgttttattttgatacaccatcacatactttcagtgaataccttcttgtaccaggtttctcttctactgattgtatacctgctaatgtaagtttaaaaacacctgttactaaatttaaaaagggcgaggaagcagatatttatatgaatatacctttgacttctgctattatgcaatctgtttctgatgacaaaatggctattgcacttgctaaagaaggtggtatttcatttatatacggttctcaaactattgaaaatgaagctgctatggtagcacgtgttaaatcccacaaagctggttttgttgtaagtgattcaaatattaaacctgataacacattaaaagacatacttgacttaaaagaaaaaactggacattctacagtagctgttactgaagatggaacttcaactggtaaattattgggtattgttgcaagtcgtgattatcgtataagtcgtatggatttagatactaaagttagtgaatttatgactcctatgtcatctatagtttatgctaacaaagatgttactttaaaggaagcaaacaacattatatgggaccacaaacttaattctcttcctgtacttgatgataatggtaatcttatgtatatggtattccgtaaagattactcttctcataaagaaaatccacttgaacttttagattcttctaagagatatgtagttggagctggtattaatactagagactttgctgaacgtgttcctgctttagttgaagctggtgctgatgttttatgtatagattcttcagaaggtttttctgagtggcaaaaaataacacttgatttcattcgtgaaaaatatggtgatacagttaaggtaggagctggaaatgtagttgaccgcgagggattcctttacctagctgaagctggtgctgacttcgttaaagttggtattggtggtggttctatatgtataactcgtgaacaaaaaggtataggacgtggacaagctacttctataattgaagttgctcaagctagagacgaatactttgaaaaaacaggtatttatattccaatttgctctgatggtggtatcgtttatgaccatcatataactttagctttagctatgggtgcagattttataatgcttggtagatacttctctcgttttgatgagagtccaactaacaaagttaatataaatggtagttatatgaaagagtattggggagaaggttctgctcgtgctagaaactggcaaagatatgaccttggtggagataagaaactttcttttgaagaaggtgttgactcttatgtgccttatgctggttctttgaaagacaatgtaactctttctttaagtaaagttcgttctactatgtgtaactgtggagcacttagcattcctgaacttcaaaaaaatgctaaacttacacttgtatcttctactagtatagttgaaggtggagctcatgatgttatgttaaaagataatagaaatttataatataaatatactttaatcatttaaacaatgaaaaagagacttatctctattttgagacagtctctttttatattagtataatttttatttaactgtaaattcaagaagcttacttttaagttcattttctatttttgataattcaacttctgcttcttgtctctttattctaccatcatgttgtattttaactacctcatcaatagtagatattagagattgattagttttcttaattgtgtctatatctacaattcctctttctgattcttttgctgtttctattgttcccatcttcaaagtttctgcattcttcaataaaagctcatttgtcatattactaacttcacgctgtgctttcatagcttgatttaagtgagaaattccaagagcaagcactatttgatttttccataatggaatggtatttactatagttgattgaatcttttctgccatcagattattactattttgaaccaatcttatctgaggagccatttgaagcgataccattctagttaattctaagtcatgaattttcttttcaaatctgtcacaaagtgaaaccatatcatttacagattgagcatcttctgttgaaccagataaacgagctttttctctcaactttggcatttcatattctttcatatcctttaatttttgttttcctgctataatatacatagtaagctcttttgagtaagctaagttcaattcatacatcttatcaagcattgctatatctttcaatattttaacctgatgcttttgaagctctttacttactttatccacatttacctctgcactatcatacttagtttttaaatttgaaattttattatttgcctttttaaaaattcctaaaaaaccactttgttctttttcatctgctgaaaatgcttttaaatcagtaactagatttgtaagcatatctccaacttctcctaaatctcttgtttttacactctttaaagctgtttcagaaaaacttgctacctttttttgagcaccagctccatattgcaaaatcatatttgtatttgtaatatctattttttccgcaaattcctttaccatcttgcgttcagattcagacagtttttcttcttctgggtctttttcatcctttttcattaataagtcagaattatctatatcattagtgtttgattcttctccaaatgggtcaagtgtcaaagttggcataactggtatatcatctaaattattcattgtatctttctctcctcttccttcataaagtactgattaacttatataatacacattttatactttatgactaattaattgtttaaaaataacagaatattttttctattgaagttaaaatttaccactcgttaatccttcttggactaacatattctctaaaacagtaatatctgtagaaatatcaatggcttcatcttcaaacagatagtccaattgattttcaaaagctactacaatcgtattcattgtattttcaatactttccatagttgttgttatattttctctatcaattccttgttcttccaatgtatgatatgaatttaatagttttaaagtggttggaagataataatccataaatttttgtatttgagtaagttttgatgggtcatgttttacaacatcaaatattttacttgtaacatcttctacttgtacaattttatcgcccattgattctgatttaatatttttattagcttcttttatttgtgttagataattcattcctttatttataattgtatcaacttcattggattcatcagtcttttcttcttctttgacttcatatgctacatcttcatatcttggtggaataaaatcttcatttgttaacacaatctgattatttcttttatcaatataagtatttataaagtagtttttgtctatcatcttttgtacatcttttattataaaatttaatgatttagatgtgttttctgcaataagttctactggaataatatttctattgtttataattgtacaatattttttataacgagaaatttggtctcctaatctcttacctttaaaaatacaaactcctcctataagtaaaaatactgcacatacttgaataggaagtattacagcccatccaattataatggaaatagttgaaagtactaaggctgataatgtaaataagcttaccaaaccccatccaattatttttaaaaatttacttaaaaatgaatttattaatacagatttttttgaaaaattttctgatttatacatattttataatcctttcattttcactaatattattaatatattgcagtttgattatacaattacttacttattactgtcaaggaatttgaaattctacaaattgtttcaaataaagtaatagacttaaatataagcatattttaaattaaaaatatacttatatttaactccatataaaaataagagaacttaactttaattaaaatttaagttcccttatttttatttgtacataaatataattagcattgtttatgttgactatacatataaataaaaaattgtattaataaagatttgcaaatatctctcttatttcctctctactaagctctacataattattagcaagtagtcgttgttgatttgctattgtactatctgtaaattcatctatctgactttccaccattccatattctctcaaagcttttttagctattaatttatttaaaaacttttctaattctccataaacatcacagttagggtcacattcaagggcatctgctaaaatttttgtacattttataatttttccattaggtttttttctagaatacatcttaaatacttcagtaaagaactgataatttgcttcaccatgtgcaacatggaaagctccacctattgaataagatagtgcatgaactgctgcacaaccagcatttccaaaagcaattcctgcataatttgatgcaagtacaaagtctctaagatgattaaatctctcttcttctcctttatcaactatcttcttatacccatccataatcatttttattgcttgtagagaatacatctctgtaaatggacttgcttttggagaaagataagactcaatagcatgtataagagcatctaccgaacttgtaacaaagaatttgtaaggtaacccttttactgtctctggaattaacactgcatagtctgcatatgtttcttctactgcaagcccctttttagtatgtttagattttaactctgcaatagctacatttgttacttcactacctgtaccacatgttgtaggaactactactaactcttttacttttttaggtgatacttctccttcaaataaatcaatagacttttctggaacatcaagtgctaatatcttacatatatcaactattgttcctcctccaaacgcaataattctatcaaaattgtatttcttcatttcctttgtcatggagtctatcatttcatcagatggttcacctgttccaaacttttcttgaaaaattaaatttgtatctattccaagaggtttcatatatggctcatatataaactcattagtaattactaaatcattttttcctattttaaattcttcattaaattctttaaatgtatcaaaataaaatatctttggaactactctaagtgcttccattattaacacccctctattattaatatttctccttaaatctcttttcaaattctactgctagactttctcttacacttggatgagctatatttattaaatttcttgctctttctctaagagattttccttttaattctgctataccgtattctgttacaatatagtcaacatcatttcttgatgtcgttataggtgcaccttcatccacaatagatacgatttttgaaattactgtaccatctttttttgtagttattgaaggcatagctataattgcctttccatcttcccccatagacactccacgtataaagtcaacttgacctccaacaccactaaattgtctaagtcccatagcctctgcaactacctgtcccattaaatcaacttgtatagcagaatttatagaaaccatcttatgttgtttcattataattgctggatgattcacatagtctactggttttacctctactgcagggttattatttgcaaagtcatataattttttagtacccattaagaaggtaactgtcattttttctttatcaaaatttttatatttaccatttataacacctttttcataaagggccaaagtcccatctgaaatcatttctgaatgaatccctaaatcctttttatcagttaaaaataacataactgcatctggtatcccaccaatacctagctgtaaagtagaaccatcttcaattaatgaagcacaatttttaccaattgcttcttctacttctccaatctttgcaggttgtagttcaaataaaggttgtgatttttccactatatagtcaaactctgatacatggactacctcaccataggttctaggaaactggtcattcacttgaacaattactgttctagcagttttaatggcttcataagtataatcaactgatgttcctaagctacaatacccatgttcatctggtggagttacctgtgctaaaacaacatcacattttaatcttttttctctaagcaactttggtacttcatggaagaatgcaggtgtaaaatcaccatctccattttcaattgcctttcttacatttccacttacaaacattggatttactctaaaatgagcttccattcccttagcagtatatccaccactacccaagcttaccatatgtttaatctcaacatctttatattgttcagcattttcaatcatagcctctactagtgcaggaggttcacctacacaatgtgcaaatactacagtatcaccgtttttaatctgttttacagcttctgtagcactacataatttactttgatacaattcttgccaactcaatgaaatccccccatttagcttttttaagtttcacaaattgctgattcaatcacatttataactctttctatatggctaaaatcccacatcttaacacattcatttttcactttatattgttgataggatgcgcatagagttgcgcatcctccaattataagtagcaaatcatactcgacgttctcttgtgctatgctaaaatctaccctaccattgaagtgctctttgattattgtaagagccttccctctttcgtatctagggttacagcccccacaaaatctaactccacaggtcatgtgtaaattctccttattaaaaatttctttacttagctaaaaaccaccataattttataactatctcttatactacatatcttttcattaattaatacacattaatatataatttccctttatatatcaactttttataaatttaaagcttcctctttttttattcccgcaattttcttagctaattctttcttttgatttatgtttccttgtcttgaaatcattattctttgagcttgtggtgaacctgccccatgcattgactcagttctataaccaacagcagatgaaccaagacatatattttctaagaatcttaatattctcattctttcttctgttgaagccactgaagaagctttaaaatacttgttacatacttcgccaatagtcattccacttgttccaactttaaggtctgatttaaagtctttttctgaaggcatagtaaccataagccctccagctatatcttctgcaagtcttactatttcataaggaaatctagttacattttgtttacacacatttgcaagaagtaaatctatttgatagtttccagcttctgttttgtgaccttctgatgaacatgctataccacagcaatataagctttcattaaggtgagtcatttctattagtttatcttttatatgtgaagctttgtttgctccattataatcagctgctaaagctgctgctcctattattacatcacctactcctactttacatccaccataactttgtctatggtatcctgcaaatctctctactaacataccagagaaatcccattctccacataagaaaattctatcatttggaacaaatacattatcaaatactactaaagcttcttgacctccaaactccttatttcctaaatcaacatctgcaccttcttctaattttctggtgtcacaagattgtcttccataaatcataaacacaccttcagcatctgaaggaactgcaaatgatacagcgtagtctttatctgcttcagtcatacttatagtaggcattataaggtgctcatgtgaatttattgaaccagtttgatgtgcctttgctcctcttacaattatcccatcttctcttctttctactatatgaaggaacatatctgggtcaggttgagcactaggtgatagacttctatctcccttagggtcagtcatagctccatcaactactaaatcgttttcttgtatataagttaagtattttacaaaattatcatgataattagttccatgggctttatcacactcaaatgttgttgaatacactgcattaaacgcatccataccaacacatctttggaaacaagaagctgttttttgaccacatagtctttgcatttttactttttttatcaaatcatcaacactttgatgaagatgaccaaatctatttattttttcacctgtgatatttgaagtaactgtcattaaatctgcatattctgggtcatgagctaagtcataagttgctgctacacaatttatagatggtctaatcataggatggtcaacccaattcttaacctcttcaccaaacatataaaccttagtatttaattttctcaaactttcaatatattgagctcctgtcattaatgccataataaaaccactccttctcttttatagatttttttatttattttaaattataatacttccttcttctatatgtctcttaatattttaaatttagtccaataaactaatttaaatttaatttatgtcttaaattcattctaaattaaaatatattcctactttaatttagaatgaatattttttgtctaagttttatccccaaagttcttcatctgtagggacttcattttctggcatataataagcaattctagaaatattaattagatgcttataatcaagattttcagagatgctgttatttccccaagaaccacaacctagagtattagtaggtgcaagaccattaaagaaacttcctccagcactagtagcacaacattgattaataacaaatcttgatacttctatattttctcctgcatattctatatttttaactgtatttgaatgtatagatacactatgtccttttccttctacatttaaatttgcttttgcaatagctacaccttcttcaaaacttttatacttgtatgcagatataactggacacattttttcttttgcaataatatcctcttctcctggtccatcagcttctattactattatttttgtatcttctggtatctcaacacctgcaatttttgcaattgtatgaactgattgacctactgcatctttattcatagatttatttacaaacatagcatttctgaaagcttctttttgtactttatctctaactataaaacctttgttatttttaaattcatccattattttatcaaacatttcttctgctactattactgactgttcacctgaacaaatgataccattatcaaaaattcttcctgctatgattttaggtactgcttctttaatgtctacatctctatctatgatacattgaacatttcctgcccctacaccaagtgctggttttccacttgagtacgcagcttttaccattcccattcctccagtggcaattactacatctgctgatgaaattaaatttcttgtattttctcttgattgttggtcaagtatttgtattaaattttctggagctcctattttttctaattcttcattaatcatctctacagtttttgtactacatccaattgctttatgatgaggtgtgataataattgcatttcttcccttaagtgcaaacattgcattgctcataggtgtaacgattggatttgtacaaggagttattgccgctactactccaactggtttagctacctttgttattccagtttctctatctatatcaattataccaactgattttttatcttttaaattgttatatataacttttgctttgcttttatttttagctaccttatcttcatatactcccattccagtctcttctacagcaagtttagctaaatattcagcattataatacactacttttccaactatttttactattttatctacttgttcttgagtataacattcaaactctctttgagcttttcttgctctctcaatataaccattaatgtattccttacttaaatcttcaaagttttccactgctttttccatttaaaatctacctccaatttattaaatattttataatgcacttttaaaagtttcagcctttttcattgtacctgtactcataaatttactatgccatgataaagcttcgtccaatatgtgaggtgtttgttttgctccacttttacaagctctatttaaataatccctaagttgttctttataatctggatgggcacaattttctattatttttatagctctttctctaggtgcaagacctcttaaatcagcatatccttgttctgttacaattaccattacatcatgttcagtgtggtctacgtgagataccataggtactattgatgatatatcaccattttttgcaatcgactcagtactaaatatagttattgctccatttctagcaaaatcaccagaacctccaattccattcatcatctttgaccccattatgtgagtagaatttacatttccataaatatcaacttcaattgcagtgttcattgcaattacaccaattcttctggctatttctggattgttactaatttcttgaggtcttaatataatcttatccttaaaaaaatcaatatctttttcaaattttattaatccttctggagatggacttacagatgtagtagatgccattgtaactttacccattcttattaaatccaacatagagtcctgtacaacctctgtataacaagttaaattttcaaattcagattcacataatccatataatactgcatttgctacacttcctacaccagattgaagaggaagtaaattctttgataatctgcctgcctttacttcttctcttaaaaaagcaataatattatttgatatttttttcgaagcttcatctacaacccccaatggacgggtcttatcttgcatattggtaattactactcctgcaattttatccaaaccacaaggtatatatgttgttccaattctatccttaggatgatttatttctattggttttctatttggtggattttccgtaatatatatatctgccataccttccatttccattggttttgcaagatttatctctactattactttatctgcactttttataaaagatggagaattacctatcccactagttggtataatattcccttcttcagttattgcaagtgcttctactatagctacatctactttaggtatagttccataatttaaaaattgagtagaatgacttaggtgcatatctatataatcaacaacacctttattaatattatttctaagtattgaattagtttgataaggaagtcttctttcaattatacctgcttctgaccatgctccatcaacttctgggcctaaagatgctcctgaatatacggttaattttatcttttctccacttttagctctttctgaaactgctaatggtactgcttttggatagcctgaaggtgtaaatccactaactccaataaccatgccatcctctataattttagcagcttcatctgcattcattattaaatcacacaattctttatttcttaatcttccacttaattcttcaaatgctccttcattattcataaatatccccccatataaaatcttatttacattggaagtttgtgtaaaactataaccaatataactttagttaataatgcaaatggatacgtagcaccataacctgctgctgggtcatcactatcaagagcatcaacagcagctccaagacctggtgttgatgtcataccaccacagacagctccagataataaaatccaatttaatttaaatacgtatttgccaactaagaatcctatcatcatagctgtaacacctactgctattgctactaaggctaggtgcataccagatgtcataattgaatcaactacttttccaccatatcttaatccaactattgctaagaaaaatactagccctatttgttttaaaatatttaaaaccttttcttccattctgaaatttactacccctatcttacctatatatccaagaactagagatacaattagtgaacctcctgttgcgcctagtgtgaagtaccctagtggtcccataaatacatgtattcctccaactaagtatccagctaaacatgtcaagaaaaatgttattatattaaatggaacttctggtatcgttttaccagaaacactatctcttgcttccttcatttccttctcatattttcttctttcttcttttaggtccatcctaaataattttggaaggaaatttacacctaagattactattaaaactccaaaaggatatgcgactgcatgacctataccaacaccagcttcagcatatgcaatatacttatctatttgctcttgagtcagtgatgtagttgtattcacatccaatttgccttctgggtcgactacttttaaaatttcttttttatcttttattgaagctttttcaaattcttttgatacatcttctgcatgtttaccagctgtttctaaagcagcagctaatccaggcgaacttgttaatgctcctgtgtaaacgccagaaacttcataagcactacttcctttatcacttgatagtaaagtcattgcataagtcatagagccacctataaaagttataagaactcctaaaattacaaatcttgctccatacttctttaatacagctttcatatcttttgctgccaatagaccaactgctgcaacaaatattattaaaaagaaatcaaagaagtcagaagaaataattccattccccatcattacagttgctgccttatatcctgctgctgtttctccttttgctattattagattccccaagctatatgcaagccatccaataaataatcctgtaaataatgctcctgataccccaaaattaaacttcccaaatttaatttttccaaataaaattcctgtaattactgcagcaaacataaggacaaaaggattcattaaaaaatccatcaattcaaacttcactaaatcactccctttcatttttcgttattaaattaacaaatattattaaaaaatatatttctcctttctccccaatactctattttgttattaaattaacatttctgattaaaaaaattttatcttgttaatatcacttttttctttatgatttaattaacaatttaattgtaaaaataatttttattttctaatagataattttttgatattcgttgatataactgtaatatagattgatttactctaaaccataccagctattctcttttgttaatttaataatagcactattcttaatagattgaaaatatcaaaaacttatgctatgatagtttaaaactattctatttttttacaacaatatacaaaacttatgctattgttaattatatacttgtcactaatatgtaaatgaaaggaactaataccaaatgaatataaactatttatactattttcaaactgtctgtaaatataaaaacatgactaaggctgcggaaagtattcatatttctcaaccatccataacattagcaattaaagaattagaaaaagaacttggctttgaacttttttacagaataggtaataaaatagaattaacgcctgaaggaaaaatttttttagacaagtcaaaacattttataaaacaatttgaggattttcaatgtgacgcacttgatttaggaaaaaagagaaaagcttctctcaaaataggtattcctacagttttaggtacgtttttgctttcaaaaatacttcctagatttaatgtaatttatccagatatagagcttaaaatttttgaagttccaacatttgttggagctaaaatgattgaagaatctacacttgatttttgtattggtataattgacagtgatatttatgatgatatagattcaaagacaatctataaaacagaattgtacttagttacaaatcccaaaaatgaattggcaaaacatcccattatatcaaattatatgttaaaaaatgtaccttttgtaatcttatctgaaggttcttatcactataagattattacaaaaagacttgaaaaagctaagccaaatataattttacactcaaatcaactttctaccatacgttatttactagaaaatgacttggcttcaacaatattgtataaagaaatatttcaaaatacagaaaatctctgttcaataccattagaacgtgcaattactgcaaatattggagttctttggagaagaaatcaatacatatctcatagtatgaaactttttattgagtatatggcatctattcatataaactaaatttatattatacagatataatattttgtttaaatacaatgttaaaatattttaataaatagtatagtttagagtatcagtataaaaatacaatatagaatgttatagaattataattgtatacatttaaatctaaatattattatactgatactttttaaaataccttttattgataatacttttttaatcaggtttacttggacaacctagcaaaaaacccacgcatcctgagacaaaatctctcatctgtgaaatagtacctaaagaagctgatgttgtagttgtaaaatttcttacaacaaaaagtactgttaatgctgctatacaaattacagtagctataataatttgcaattcactagtttctccttcttcaaaaccttcattattattaataggtattttcttttcataattatcagcttctgaagtaaatccaatggtatttttgacattcattatattattttgactagactcttgaccttttgggggtaaattattatctataaaaagatttgaagatacatcagtatttgtatacttccttaaaggtctctttataaaattagcacttaaaaaatacccaaatatagctgctgaagtggttcttactactacatcaatagttgtagtatcttgtgaatttacttcattaacaaataaattatatatagattgaaacattaatattgccattacaattataaggcatctatcaattaatttgattttataccaggctttttttatattttttataaatttatgttttttatacatatatactatcacctcttacaataaaattaagccctctttactataatatgtaaatagagcttaatagtgagattatgttatattttatgtaaaaaaatatatataaattaaattatttgtctaaaatcatcaaatctttagggaatttagtaagtctttctggaccatttttagtaatcaaaacagtatcttctattctaactccaccccatccagggaaataaatacctggttccattgttattatacatccctcttctatgattttatcaccataattaccaatgaaaggttcttcatgaacatccctaccgactccatgtcctataccttgatagtaatagtcttcatattttttgacaacttttcttatctcagcatctggaattgtcgcatgtacaccagctttcatgttctcaacccctacattttgagcttccttaactaaattatatatttctaattgcttttcagaagctcctccaactataaaagttctagttgtatcagatatatagccattatacatagcaccatagtctataagtacaaaatcacctttttctataatcttatcactaggcttaccatgaagcaatgaagtctttgctcctgatatcagtatagtttcaaaccctatattttgtgctccgttcattttcataaagtactctaactttgtagccagttcaatttcgctaactccagcttttatatgtggaatcaattcttctaatgccttatccgctatttcacaagcttttcttgtatttttgatttcatctttgtcttttacatatctcaaagtctctacaatattttctgtaggtattaattctccattatccttctcaatcagatttttaagttcttcatatttatcaaacactatattagttctttcaaacccaagtttctttatacccactttatcacatacacttttaactgcctttgccacacttctatcaaaattatgccaatttataatttcaaaatctttgcaaaccttttctgcaagctccatatatctactatcagtaactaaaaagtttccatctttgcaaatcactgcatatgcttcttcatcaggaaaaccacttatatagtttacattagttttctttgttagatatagtgcatcaacacctttagttcccaacaatcctactacattttttactctgctcatgattttacctccaaataataaattttatcttaattatattatatcactaattaatcttatttttatctaacagatactttattcctaaaattttttcatattttattaatttcattttaatacttcattagtttttatttagttagaaagcttaattttaattgaataaatataataaattagctagagaatcaaataaatggattgtgttaatatataaatattgacaagatataaaataaaaagaacatataattataatcaataaaattataactatatgttcttatttacatataaaaaatgtacttattttgcagtatatccagctttaactaaagtttcaactgctaagtctcctttagcttcatttactaaaactattggacctgtacaacccataccactttcagcatagattccgtttttccataactcagatactgcatcttctaaatccattatatcaacaccagctatttgacgagtaacaatttctttatctggcattttaacttctactttttcagctttaacttcttttttagtaagagaggatataatgtcatcaaattttgcttttttaacctttgcaaattcatttcttgcaacattacttatatctccctttacaacatcataagcgtattttaaagcatttgctactaccggagaacctgatgctcttgatactataagtacctttctatcatagtcttctccaactccaggtccgtatccaaagccttgagcttcataatctccacctgtagtatatgaagaaaatactttcataaatatatttccagataatgtatcagtaaccataacatcaggtgcacctacaagtaaatcattacctctcattacacatccaccatctgctctaattgaatccgcaaactccatgtcatatccattatcttttaattcttttaagcacttctcaacttgtcttgctccatcaacattaagtattccaacttttgggcatttgttacccattgatttagctgtagcaataccataaatggcatttcttaccattgcctctattctattagtagcacttgttcctgttgttgttgcaagtatcatttcttttccttttgctggagttattactctacctactgtagatacacctattggaaaattataatgcatagtaacacaagcatcaatatatcctgaatctaataattcttccatttttgcatgcatttctttttcatcattaacttcaactacttcaaggtcagtttccacttttggtccaataagcacaatatcaaataaattagattttgctaattgtgcaccattaaccatgttttctacaccatgttcacttccaagtgtagtaacaccaatttttacttttttgccaaattcgccgctttctattgcattagctacttctaagaatacatctgcgattactttttttgacatatcctcacccctattcttctaacatatctaatgctagttttttcatagattcagctattatcttcttaatttcatccttagatattcctgaagtctcttcagtaacacctgtatttctttcagctataaaagatactccatcaaataagttagtcattcttcctaagaataaactaccttttccaactatcatagctctatttctatttcctgtagttaaatcatctattaaaaatcctatataaggagctcctgatggtatatgtccttgagttggtgcccatcctggtaatcctttgttagaaacaaaatctttcaattctttcttttctaagtctccacgtttaacagcaagtgcccctatcattttgtagtttgcttctggaacatctcctgctcctgctggcttagttatatctgggttttgcatttcaactgaatacacatcaacatctgttatttttaaattagctctatcaagacctgaagttataagtgctgtcataactgcttgtggtgaagaaccagttccaacagtatgcttacctgttaaatcagttcttataactggatttacaccatcattttcagatacaagtactgcaaatcctccaacaacatcttcaagtacaggaagaccttttttaacatggtctttagcattcattccaagtttagcacttgctccacctgctactaccattacatttttatgtatgccagcttttactaaagctgctgcttgaattaatgcatgagttggtgctgcacaaaatcctcttgtgtcagaaccagttgcattctgaagtcctgctatctcagctattgatttagcaaagtttcctccacctctttggtttatatctccacaagcttcttctgaacactcaataacataatctatttcagcagggtctattttgctatgtcttagcatttgaatagcagataaaactccagatgcttttactactagattttcaaacattgtatgggcatttaagttaacatctacatcatgtgctctttttacataaccaacaaattttccatcatggtataatccttcagctatgtgtgttgctactaattctttaccttcttctatatcatcaccctttaatttacctacaaatggtgcaatttcagggtagttattttcgatttttggctttacttcatcaataaattcttgtgataattttactaaatcaaatgcatcacttatttgcattaaagctatgaactcatcttgaggcattatttctccaaacttaccatttctagttccctcaatcttttgttcacaccatggcattggtaaatctcttaattcttctggtcttctatttcctatataaacttgatttggcatgtagttaactacatcttcataacttcttatatgattacttacttcttttaaaaattctgaatctgaatttgttgctctttcaactgtacaagtacttccattttgcactatcatatctggagtatgaataagtacatagcctgccccttttaaaactggataagtcattttgtgcacctccataaattttatgaacacttattttttaatcttattaaacttattaaaagctctaatcattgtattttattgtatatttgattctattattgtttatgtattttggcattttttaagatttcatgaatgaataactccaatttatccattcatgaaatctatattattttttttgtgtatagttattttttatttttagtgtgtgtttatatttttatctatataatatatgtgtgtgttatttttatttttcaaatactgtttgaccatctacttctgtagttaaagcatttaatgctttttctacaaggcctcttcttagggctttttcttctgtagggtcaagcgctggatttccaagtggatgaggtattgctatagttggaactattctattagcccctactgttaatgaaataggtactactgtacacatatgaactactggaagtccagttttttctatttcttttaccatcgttgcaccgcaacgagtacaagtacctcatgtagaagttaatattactgcatctacaccatcagccactaatgctgctccaatttcagaagcatattttttagagtttgcaacagatgtaccattacctacagttgtatagaaagtctcatgtaattttccaattacaccttctttttctaaatctctaagaacatcaacaggtaatactctatctgcatctaaatttgcatacactgggtcatatccaccatgtgcagtttcataagtctcttctgttaaatccataactcctgctatagaataagttccatatttagaagctgaagaagactctattctatctggatttccttttggaactataccaccagaagtaactaaagctattttacattttgataaatcttttacagctttacttgggtcaactctatcaaagtttggcattgggtattcagtttcaaatggttcaccttttattttcttaactaacatgtcaacagctctcttagaacctctgtcttcatggaagtagttaactcttattcctctagctatgtatccttcatctttaggagttccaatttcttctccattagcaagttttactgcaagtttagctatcttaggaagtgcctttctcatacctgctgcagaatcagaagtttctactacataaacatcctttttgaacatatctgctcctggattttcaacatacatacctgttaaagctggtatattcaaagcatcttttacaactttagttattgttccagcagcaaccccatatctaccagcattaaatgcaggaccagctatgaaaagttgtggttcaaaaccttttaccattgataaaacttcttcacttgcactatcaatattttcattgaaatagctatctccacaaactactgttccaactatttcaatatcttcacctaataatttatcaagttgtaaacttattggaggtaaagtttctgccacatgtggcttagtatcagctttttcttctccacctataccagcaaagaactgattaatataatgtactgcttttagttttcccatctcttagtttcaccccttttgcttttaggcattaaaatttacaaaattcttctcttataccagacatttcttcttctatttcttcaacttctaaaaccatttccatcatacttatttggtcttcatatacactttcatcaaataatgattttattggttcctcaacaacgtggtaaacacttaatcctaaggcaactccagcaagtggtccagcgaaagttggatctccagcagttactgtttcggctgcaagacctgcagcttcggcttcagcagcacctagtaaaatcacaacattttcagctccgaatttatcagcagcatctttaactctgttttgattttctaagtccatagccccagcagctgttcagacaaagcattctgtagatgagaaaacaacctctgctccttctactgtttttacacattcttctatcgcaggtcctggtataccatcacggtcacctattataagaacctttttattactaagtaaactcataataatcctccttattatatttctaatatatttttatatatctataacacttattataattatctataatatgttttattaacattactcaatcgtttaataaaatacttcttaatatcctttagcagttaaatgaccaaatcctgtttcattagttgcacctgttatagcttggatttcaacttcaatagttccatcagctcttaaacttccatcagaaccaccagctattacatctactacttctaaatgtccaataactttatctaacttaggaagaactacaacttggttggcatttccacctgttacaacagcatcagctcttacatctgcatctgcaagtgattgagaacctccatcacgtccagcatattcatctgtaactataactgttttaacaccttgcatttctatcttcttacagttcattataaggtcagtatcaggatttccaaaaccttcttgtgaaactataactgcatctaatcctaaatatttacataatttagaagtccagtttgaagatctttctttatctgctaggtaaacattttcattagttataattacacctacaaagtttatatctttaccatgtcgtgcatataagtcttcaacaaccccattgtttatatgaacataacttgggtttttgtcacatgcagaaacacagttaccacttacaattgctccgtccattaattctgttggatataataaagttggtactatttgttttgcatctactccatatacataagtatcatgtaataaaccttgagtctgaagcatgtaaacatatcctacttttggaagctctggatattcttttattgattcaagaagaggtttagtttcatatactgaaacttcatctggagtaagatttcttgctacttctcctaagtacattgctgctttgaatcctatcattctaacagctttttcatgagcgtattgttttaaaccatcaataggttcagctattactactacattatttaatttagaaaatggagtatacttagctccttctccagtcatgtctattataccttcttggaaacctactatttttccagtagttacaacagctacaccttttaaagcatgagtttttccttctcctacagtatcaactttagacatgataccagggaagattcccccattaccttcaacttttactcttggctcaataacatcttttacaggtgttattcttacgctttcacctggacgagctaattctatatctatagatttaatatgctcatctccaccaatttcttgtagcatctcttgcttattgatgaataatactccatcttttacttctgttacatcaccaaattgaatatcttttataaagattttccctaattcaagacgcatacttgcacctcctgttatttaatttgtgtatatgcatttgagtttttctcaaaattatatcattttacaatttatcttatttttttaaagatatattattgtgtttttatgccttaaatctttattttattactaaaaaatatttattgtaaaaaaattattttatttaaaattatttttttaacaaagttggacataaaaacctttttcttcttatcttcagataaaaatagattttttcttttaatgttaatactttatcaacatattaaagatattttttaatcatgttttctatattaggaactgtagcatcatccttagtaacttcgtctactttttctccatctttgtatatagccatagttggaagacctaatactttttgttttatagctaatcttctagcttttgttgtatccatcttacagaattttattttatccccataagtctcagctaatttatgaacatctggcattaaagctttacaaggctcacaaccttcactccaaaaatcaacaaatacaaaaccttctgcatttaaaacttcttcttcaaatgtagccttatctaaatctaacattttcttattcccccttgaaatttttattttaattttaaatattattcattaaatttacagacactatttcttaatttacagattctagttcccaaatttttcatcaatgtatttctcagctactatagatgcaattgcgccatcattagttgcagttacaacctgtcttagagtcttagatctacaatctcctgctgcaaatacgcctggtatgttagttctcatatcttcatcagttattatgtaacctttttcatccatatcaactttacctttgaataaatcagtttgagcatctaatccaacgaacacaaatactcccattgttccatcttcttcatctgcaaagtattcatgagtttctccagtaactttatttttaaatacaactgattctaatattccatcacctttgatttcttcaattactgtatctaataaaaactctatctttggattagcttttgctttttcttcaacactcttagcacatctaaatccttgtcttctatgtacaattgttacttttctagcaaatttagttaaatacattgcttcttctaatgcactgtctcctccacctacaacaaatacttcaaaatcttcaaagaaatctgcatcacaagttgcacaatatgaaacccctttaccagtaagttctttttctccaggacaaccaatctttcttggtgttgctcctgttcctattattactgcttttgctctatattctgccttttccccttttaaaacttttatatctccatctagctcagtatcaacaatgttatctcttagcatttctgctccaaactctttacactgttcaaccattctagctattaaacttggtcctgttgcatttggaactgaccctggataatttgcaatttcatgtgttattacaatttgtccaccagtcttgtctttttctaggattagagtttttaactttgctcttgctccataaagacctgctgcaagcccagctggtcctgaaccaattattactaagtcatacacattttccattttgacttatcctccccaattaaatttctcattttatttaatattaaattagatttaatatttaggctgtttcaataactttttaacaaatttttttattcatactgcattctttgtattgtattataaaatatatcataatcaattactctaaaatcgtcttggacattttctgtccattttggagtctttttattatcctgaaatttacttgcagtgatgattgcttcttcaattaaggttaaagagtttatatccaaacgatttcctttctttagtataacagtcctgtaaggtgtttcatttggttttacactcccatagagtggatgagataaaagttcataaccttcatgtatcaaatctctacttgcttctaagattccaatataagttgtgtctttaaacaaaacttctctgccttgaacttcttcttttacttttggattattcgtaattattatcatttttttactctctttcaaacttttatttattacttgataaataaaaaacaggaaaaacaaatctcccaatttgtcttccctgttaaaatcattttcagagccccgtccaagtacagtcacctttacctgagaatttcatctaatcttttgggtaagtaagattaaacttgtcccttcggtcgctttttataaagcagtctcccatactcttcatccggattattatttttttcagaaaatttaaaattaagcaatttatcctttgttttctataaatagcttttttctatctctgttgacttaagtatataaacattctataaaatttgcaatagtttttttatatgtattttgtatacatttttacttttttttccaaatgttgatattgcatatttcttgtattttcttttttttttaagtacaaatcttttttagtttattttatcaatttagttaaaaacaagactattttcacaacaaataatcactttttatatattttttaatttttcacttttatacaataaaattctcataattttttataatttgctgtcatttatttcatcaaaccaagatttaacatcacctataatagactcaatacagccatcatcaaatggagaatacaaatttcccatactcacaatatctaaaaatgattttgttcctccaactttacagatatttatataatctttccatcctgcatctctatcttgaatcatttttttccaaaattgtaacgcacaaatttgagctaatacataatctatataataaaacggatttttaaatatatgtccttgtttaaaccaccaacaacctctctctaaaaaagaattatcaccatattttctatgaggtaagtattttttctctaaaaatctccagatttcttttcgttttgacttatctacattaggatttttgtaaatatagtgttgaaattcatcaacaattactccataaggtataaatttaattgaagatgataagtgagtgaatttgtacttatctgtatcttctttaaaaaataaatccatccacggccatgttataaattccatactcattgaatggatttcacaactatcaagcgttggaaaattaatttctggcatatcaatccatctagacatatacaactgaaatgcatgtcctgcctcatgtgttaacacatctatatcatcagcagtttgattaaaattagaaaaaatgaatggtgacttataatctggtatataagtacaataccctccagctccttttccttttttcgtttctaaatccataagttcattttctaacataaaatcaaaaaattcatttgtttcttttgacagttcagaatacatccttttaccattttgaattatgtatcttgaatctccctttaaacttgcatttcctgttaaaaattccacgccttcatctatgtaacttaaatattctagaccaattcttttagcttgtttttcataaagctcattggccattggaacaacatattttaatacttgttttctaacattttttatcatatcttctctgtagtcacttctcatcattctaacgtacccaagctctacaaaatcttcaaaacctagttttttagatatcttatctctaagtttaaccaatttatcaaatatgtcatcaaatttagtttcattttcttcaaagaaattataatatgctttgtttgctaattctcttgtttttctattcttagaatacatgaatttccccataccagataaatttcttatattcccatcaaacattatctcagctgaagctaaaagtctagtatactctgaacacaatttattttcttcctgcaattcacttattatttctttagaaaaactttttaaagaatactctactattgtgaaaaattgttctccaaactcttttatcaaatcatatttaaattttgaatttacaatagcattataaaaatgtgaatttaattcttcatacaaaggcatatattcatcccaataatttttttcttctttgtagaatttattaaatgtgtctgtactatatcttatcgaagctatatttgacaacgtttctattttatttcttaataaattaatcttatgtatatttttttgttgctctttataattacgagaattatttatatcttctacacaactcaaaaactcttttttcatactattataattgggtctttcatacttaaactctgaaaacttcatttaaagcactcctttacaactttactttattgtatttataaatatagatttacatgtactatgtaatacttttttataaattattatatatattaaatattctttatattataatcatgttgaataataacatatgattaatggaattacaatattttataacacaaaactaactaatataacaaattaccatcagtctatttattcaaacttctaactatataatatacatttatttatattaacaatgcaaacgataccattatttgtaattaagaattttggaattattgattacaaagtttttacattctcatctcacataagtaatatttttatcaaaaattaatattattaaactttctaaattacttatctcttgatataatagtatacaaaacaaaccatatttcccactgaaactttgttcaacactagctgtgtcaacgttttcacaggaaatttgagtatataatttattggaggttgatatgtacaaattaatcgcactagacattgatggaacaatattaaatacacaaaaaaggattactcctgaagtctttgagtccattcaggaggcaaaaagggctggggcaaaagtagttataacaacaggcagacctcttcctggtgtaaaagaacttctaaatcaactaaatttaacagatgaaggtgattatgttatatgctttaatggagcaattattcaagaagttaaaagtgagaaaatcatacatgatgtagaaatgactttagatgattttgattttatatataataacgtttgtaaaaaatataagactaaaatacacataaatacaatgacaaatttaattacaccaaatgaagcacctggaaaatatacacttcatgaagcgaaattaaataatatagaagtcaaatatatacaaaaagataaaattgatgaatctattaaaatctgtaaaattatgatagttgatgaaccagaaagattggaagaaatcatacagcaactacctaaaaatttattcaataaatatactatagtaaggtctgctcctttttatctagaatttttaggtaaaactactaataaaggaactgctcttaaaacattatgtacgaatctaaatatacctatagaaaatgctattgctgttggcgatgaagaaaatgaccaacatatgataaagtatgcaggtcttggtgtggctatggggaatgcacgtaatagtataaaggaaattgcagattatgttactgatactaataatgaaaatggagttgcaaaggttataaataaatatatacttaataaggctatctaatcatctaaaaaaactaaaaatatacctttagatttaaatacttttcacatccctactctatactaatttatatagtatggatattacctatcatttttatctaaaggtcatttttagtttttcatatatgtatatctatgatagtaccttttgtttgagtttaaatattttatatgattctactattgcctcattaatatctaaacaatatatatcttcatcatcagataatcccgcttcgtttgtccaagcatcaaaatcactcttcgtccagaagaaattcattatatttcagcaactagcagcccaatttagatgcttatcaagatttatatgaagcactcttaagtttggattattcacatactcaatcttttcattttttataattacttctatttccttacctgtagcactacaaatagagtttatttttatatcttggttgaatgtgcaagaggttcctatagcatctatagcacacattgcgctgaaacttctattatctctcaaagttactttatgatttgtttgcaatgctgatacaggatatataaaatttatactattcccatcaacaaccattatattttcataaataaaatattgtagtgtcctttctatatattctttttctatattcaactttttacttacatattcagtcacttcttgaagtgtaacactagaacctttatctattatcatatccataatagagattcttattttctgttgtgtattatccaaactattgtatttttctatttgactcatgtctactcctctttaaacttcataacactttgataaagtatcagttaatttgtttttgtactcttcatatttttggcttcctctaattctaggtcttggaatatctatatttatatcatcaataattcttcctttatctctcgacattactataactctatcactcatatatacagcttcatcaacatcatgagttaccattaatgcagttattttcttctttatccatattcgttctagctcttcctgtaaattttgtctcatttgaaaatctacagctcctaatggttcatccattagtaatacctctggattacatgctaaagctcttatcatggccactctttgtttcattcctccagataattgatgcggaaacagtttttcttttcctttcaagtctgacataaccaaaagttcttctagcatttcttctcttttttcttttggtattttctgctgtttcataggaaatagaacattacctcttatagttttccaaggaaataaagcataattttgaaatataaaagctctatctatgcccggttttttaactcttttatcatttataaaaacatctccacgttctgatttttgaaacccacctattatagtaagtaaagttgtttttccacaacctgatggtcctaaaagacagacaaattgtccatcatctatatccatacttatatcttctaaaacctttgtatgtactctattatttacaaatgtcttatttatatctcttacacttaacttcattaatctgcaaacctccatctacaaaggattttatttataaactttaataccctatctattataaatcctattaaagctgcaaatatcataagcccaattaatacatctgtatgcattaatgtttgagcttgtaccattgagtaaccgagaccggcactcgtagctataaactcggctcagataacagacatccatcctgtacttatagcaatccttgaaccagttagtatatctggaagagatgcgggaacaattacatttgtaaatatcacaattggcgatgctcccatacttctagctgcattataataatcctttgatattgctcttactccttgaatagtatttaaaattatagggaaaacccctgaaaaagctattaaaaatattgttggaccatctcctataccaaaccatactatagtaagaggaacccatgccattattggaacttgccttacagaatctactactggagataaaaccctttcaaaagttttagaaaatcccataataaatcctattggaagcccaaacaataatgcatacataaaacctttaagtactctctgcaatgttataaaaagattagtgactgtctctgcatctgtcacacagaaaaagaaaccttttattacatctactggcattggaagtaacaaagaactccctatatcttttgctgcaaaatgccagactaaaaatataataactaatagtattattttatataaaatatccatactaccatcagtttttttcttagttaatctatcgcttttatctttagaaattttaatttccaattgcttatttcctccatatctatatttcttatattcctgtactcttttaatgctttcttaaatgtagctttattctttaaagcatcaacacttttattgtaaagtgttataaaatcactatatgctttactttttttaaactctttacttacaactaatacataggtatcataatctcctaatttagttgtagattttcttttaccctctaacccaattgactttatgcaatctattacaacaccatctactaaattactttctaatccatatgctagtgcagtccctaataatggagctacttccacattcttgtagtattttttaaccaattctgactggtaatctctattttgaatgactcctatcttttcaggattattatcacttaatagaaatatatcagaattttgaactacagtaccaacaatttcaaatccactatttacatttacatattgttttgcagcatctttacatatgattgctatatctatttcctctgaactcagagcccactgcattgtacttgctcagcaatcattaattgtaaaaatatccattatatcacttacttttatattttcaaagtagtctctatttaccatataatttattacaaaaccagaggtatcatcagatacccctattcttaattttccttttatttcttctttatcttcaaaattaaaaaatattataaatatacttcccaaaataatgataaaaagtattattatattttttatattctccatttatttataatacctttgctttccagtcttcataactcataccttcaggaaactctgggttaactttttcttttataaatttgtcaaaatcatcagctccacaagagtccaataagcttgtatcaatcgtatcttcatatttaggtatatcatctaaagcctttaaatctttatacatttgtaaattatttttatattcttcacctgtaactttccaagtaagagttctaccttctccaacagtcttcttatagatagttctaagtgcaacttcttcttctacattataatattttgcaaatattttagctgcttcagctggatttgtatatatatattctattgcttttgtatgtgctagaaccaatttttttgctaaatctggatgttcttttataaagtttttgtttaatgagaatgaacaacagttatattctttgccattagctttttctttatattgagtagatgctattatttttcctgcaccgtcattttcagctacagaaccccaagggtcacaagatgtaaaagcttgaattttcccagttttaagagctaaatatttatctttgtctgaatccatatttacaacttcatattttgatgggtcagttggtagacctgtttctggaccataatcacttgtccataagaaatcactcatatctgttgcaatttttttacctattaaatctttaggttcttttatatcttttgaaactattaaatattcagaaccaccagtatggttgttagctgctattgttattggtgaacccttaggtattgctccaactaaccccttagttcctatgtaacctgcatccatttttcctgctgccatagcttcaggaactttaccatttccaacagtttttacattaagacctaaatctttatatattcctgccgattctgctactggtcccgcagtcatatggtcacaattataataacctactgttattgtataatcatcttttccagcttttgcttcttctttttcttttggtttactactacatcctgttaatatagatgtacccattacaccaaataagattagtgcttgaatcttcttagataatttcatataaatttcccacctttatgtattatttttatttttagcaacatttgtccatatcttcgccaaataaatcaacaaattttttaccctctactctgtaaatagcatatcctacattaccatttttagaccctgatactattacttctattggtgctttatcatcaatatttttaaaggttatagtttgattctctataggtgctggtattggctttgttatatagtggctatttttatcagaaactacgactaccatttcatttgaattattgctttttttatatataactactaaatcttttttcccatcattatttaaatcttcttcagcacaagttattatgtcttctttataattttttctaaaatattctaatgtttctttattcacatttggaatagaagcatcttctttgatgttatcatcaactatttttgataaaatgattaacacaactactatacaggatattataactatctttttaagcatgatttcctatgacctctttcatctttggtattgttgatttaaatgcaaataaaataattaaaatagtacatacatactcaaaactatcaggtatatttaacattagtttatttgccaactgtattgaagaatttgttgcatctaaatttactgaattattattcactaaaagtaaatttgttatatatccaattattattgaggacagtgtcaaagttacagaatatataataacagttctttttccaataagtttaaacatgcttataagttctggtagatttgtagctgctccagctattagaaatgttatcgctataccaggagatgctccacttgcaacaagggctgctataaacggtatatgtcctacagcacatacatacataacacatgcaagtattgctatacttccaagagatagcaaacctggatttcctaaatatttttgaattatactatttggaaaaatagttgttataaatcctgcaaaaaccatacccattactacatatttactaatagtaagggctaattcaccaaaagaccatttaagaccatcaatcatattttccataaaacttcttttttcttcttctaattctattacttcttcctctgaatcattataaagtgataattcttcttttccaaaacaatttcctaaaaatcctactaaaaatggtactaaaaaaccagctattagataaatgattgtaactttaggacctaaaagacctagacaaagaactacagctattggatttattattggagttgatgtcataaaagcaagtactggtcctaaatatgctcctgaataatacatacttattccaagtggtattactccacaactacatattggtaaaaacattcctgagatagtacttttaattaaagaagaaaatttcttatttccaagttgtttttgaaaccttcttggagttaaaacattgtgaagtacacctgccaatataaaacttatcataagccatcctgatgctccattcagtgtaactatagaagctactatagtatctttaactccatttaaaacaatttctaatatattcatttttgatactcctaatttttaaacttttaattattgtttatagcttctactattgccctttcaattgtatctttatttaatctatcatatttctttttctgatttattattaaagttccttttgttataatcccatatttttttatatacgaaaaatctttccctgcttgatataattttatttccaatttatcagcatacttttctgacattttttttataaacactccatgttcatcacaagatggtcaagtgtttataaattcaactaaaattttagacatttgttcatcccctactttaaacaatttatcttttacttaaaataatccacagaaaataaatttttctatggattgtatcctatactaatttataacgttataacttggtccacacctgcactgcctaaacaagcatataggtttgggaaacatccaattgtagctccatcaaccaaattattctctatacctctttctatagcacattggtcacaagccattattatcatatcagttttttcatgtaatttacttagtctctcgcctactggattacctttagataaaaataaggtattatccataaagaaaaacatccctagaacgtctactccatgagttccttgttcaagttgtggtattatcattttgtctagaattttatgtgtattagtactactaaaaatataagctactttcatttttattccccctatactttttatattttacaaaattttacagatacaattatattataagtttattcttatttatctgtaaaatagatattagctatattattaaaagtgtatatagtatttatctatttttattaaattattgattgatttttttatatttttattaattttaatgaataaaaaatagactccttaaatttataaaacaaatttaaggagtctattttaattaagtttatttcaatataaaacttatatatttctcaaattcttcatacttatatcgagagctttaacagaatgtgtaagcgctcctacagaaacaacatccacaccaatttttcctatatcttctatagtatctaaatttacatttccggaaaattctacaatggctcttccatttataatatctactgcttgttttgccatttccaaactcatattatccaacattattatatctgcattagcttctattgcttcttttaccatgtctaaagtttccacttccacttctatctttctaacaaaagaagtattttttctagctaattcaactgccttcttaacactaccagcagccccaatatggttgtctttaagcaatattccatcagataaattaaatctatgattgcatcctccacctactttaacagaatacttatctaatattctaagattaggtatcgtttttctactatctaataattttgtatttgtaccttcaagcttttcaacatacctacttgtaatagtagctataccactcattctctgtaaataattcaatgctacacgctctcctacaagtaagtttctagtactacctgttaatacagctatcttttcacgattctttactctatcaccatcatttttatataattttacatctacatcaccaagtatctcaaaaactctcttaaatacacctaagccagctattataccatcttgtttgcaaattaaatctacagtagatttagaattttcatccacaatagaattagttgttatatcttcacttggaacatcttctatcaaagcatcctgtatcattctatcaataatcaaataattcatcgccaaaatcctcacttgttctttcaatttcttttatgactaatattttattttctttttttacctgttctatatctatatccatatctggtacatctataaacttaacttttacattatctataactgagtttatatttttagctgctctttttgaaaatacaagcccttcaagtaatgaattacttgccaatctattggctccatgaacacctgtacaactaatttcaccaactgcatataaattttccatagatgtttttgaatccaaatctacatgtatcccgcccataaaataatgttgtgcaggagatacctttatacattctttcgttatatctgttcctctagctaaacattcattataaataaaagaaaatctattaattaaatattcactatctaaatgtgttgcatctaaatacacataaggtaatttatctttttccatttgctcaaaaatagcttttgaaactacatctctaggaagaagttcatccacaaatctttctttatttttatttaaaagtttagctccctctcctcttaatgattcagatataagcattctcctaccttcattattttcttcataaaaggctgtaggatgtatttgaatatattctaaattttctatttttatattatttcttaaagctattgcaattccatcacctgtaagatgtctttgattagtagaatttttaaaaagcccaccaattccacctgtagctaaaactactatttttgaaaaaacatgaatctcttttttagatttaaaaattctagctcctatacatttattgccatcttttaatatatctaaaagatatgcatcttctataagagttatattttctctagttttagcttcttttaataaagttttaaaaacaacttctccagtattatccttactatgaactattcgatttacactatgtgctccttctcttgtgtaatctatctctccattttctttgtctaaaggcataccatattctactatctgccctacattttctatagattcatctgcaagtacttgaactgcttcaactctatttttatactgcccagccttcattgtatcttctacaaaggattctatatcatcaatatttctagcagttgaaattccaccttgtgcaagatatgtattgttgttttcaattgttgatttcgatactactagcacatttaaacttttatctaaatttaatgcacagtataatcctgaaactccacttccaactattaaaacatcttgttctaaattcataagtctatccctctatccttctgctaatttgtgcatgttaagcagtgaatttaaagccttttccatgatttcatcttctacaataacttcattttccatatttttaagtgtactatataaattttctaatgttgtctttttcatatctgtacatagtatttttccaccaggaatataaaagtttttattaggattatttttctttaattcatgtaatataccttcttcagttgctattataaagtctttgtttttactattagtagcatattttattattccggatgtactacctacataatctcctaaatctcttatttcttttttacattctggatgtactaatacttctgcatttttatacttatcttttaattcaattatttcttcagctcttatattgttatggtatttacaatatccgtcccaaaatataaagtttttatctggaaattgttctgcaatatatcctcctaaatttttatctggaaggaatataatttctttattatctatgttttctagtattttaattgcactagaagatgtaacagaaacatcacaatgtgccttaactttagctgtagagtttatataacatacaaccaaagcatttggatactgttgttttaattttatcacgccttcttcatctaccatatctgccatagcacacccagcgttacttactggcatcaatacagttttttcaggtgataatagcttagcactttctcccataaaccttactccacaaaatacaaccacttcttctttacaatctctagcaatctcacttaaataatatgagtcaccaactgcatctgctaattcttgtatttctggtggttgataaaaatgggcaagtattattgcatttttttctttctttagctctttgatttgatatgttaaatctttatccataattgcaccgctttctatatgtactagtgtatatacacctgtaaacccattatatcacttgactattctttcttcaagaattttaaacctcttaatattgttaagatatagacatttatattctcaattgattttccttttttctccatctatttaaactaatttttatattttttaatttttttgtaaaatattatcagaattttgtttatattctttattgctataacattgaaaatattaccaaatacctgtatactaagtacatggttatgtatatgtatttatttctgaaattatattagttgtaatactttatagaatttgtaggttgtccagaattaaattcaatataaatctacacatttagataatatgtatacaaagaccaaaaaattttataaatggggtgatattatgacaacattcttaatcggcttggctatattactaataggaggtgctttatacggtgcttattgtgaaaaagtatttggcccagatgacagaaaaacacctgcacttgctcaaagtgatggagtagactatgtcccaatgaaaaaatggaaaaatagtctaattgagttgcttaatatagctggtacaggaccaattctaggacctatccaaggtatattgtttggtccaatagcattcatactaatacctattggctgtgtatttggaggagctttgcatgactatatgagtggaatgattagtataagagaaaaaggagcacaaatgccttctcttatcagtagatttttaggtaataaagtatttcaagtctataatatattcctttgtcttttaatgcttttagttggtgcagtttttatttatacacctggggatttagttgttactcaaattttaaatatgaaatcgactataaataatccagttgtctggatagtttatggacttatctttctatattacttgtgtgcaacactctttccaattgataaaatcataggaaaggtatatccaatatttggagctattctacttttatctgctgctggtgttggaattggaatctttacacaaggttatgatttagctaatttaagtcttgcaaattggaaaggtattcatcctgatggtattcctcttattcctacattctttgttacagttgcttgtggtatcgtttctggattccactcaactcaagctactcttatagcaagatcagtttcaaatgaaaaagaaggaaaaactactttttataatatgatgattttagaaggtttaattgcaatgatttgggctgcagctgctatgggtatttacaataaaggaatacctaaggaattagtaggttctcctgatgtaataggtttggttgcaagagatttacttggttctattggtggtatcatagctataataggtgtaattgttttaccaataacttctggagatacagctttaagatctttaagattaatgcttgcagattactttcattatgaccaaaaggaaaagaaacatcgtgttatattgtcaatctgtatatttattcctgtcatagccattcttatatttgcaaagcttagtgcttctggatttaatatattgtggagatacttctcttggagtaatcaaactattgccatatttgcatttgcaatgattacagtttaccttataataaaagaaaagaattatattataagcttaattcctggtatgttttattcttttgttatattcagttatatatttaatgctcaaattggatttaacttaaacataaatatatcatatgttttagctgccatatttactgtattatatgctattttaactgtacgctctggtagaaagttaaaaagcaaagcggatactaaattggctgactaaatctaaataaaataatacttagaataaattttattaaaaaatgataaaaaagtaggcaatctcaagttagatttgcctcttttttatttaatacagtaataaatacttaagtatttactccttattggaatatttatcctaaatctctaatataaataaataaaagttttaaaataatctattcatttatatacttaaaataaattttttggaggaatacttatgaataataaattacatgaacttgaaaaaaatctaccagaaacatcttgttctttttgcacacatctttcatttaaggggcctagcctagactatagatatgatattagatgtgttatttcagatacaaagcctgattttagaggatgttgtgaatattttgaaccagaatatacagaattaaatacaggagatttagacaatctatacataaactttcttgagacatgcctcaaggtaaattataatgattacatcaattctatgtattggaagttatttaaagaaagaaccctactagaaaacaattttaaatgttctatatgtggatcaactgaaaatgttgatgtgtatcatgttaataaaaatttaggaagggaaacttccaaagatgtagttgttaaatgtgataaatgtaattgtaaataagtgtataaaatttagataacttcacataataagtttaaataaaacttaggaggttatttatgaaaaataataatttaaattgtgctgctactaattgtgcttataatactagtggatattgttatgctggtagtataaaagtagatggaatgcaagcaactactacagaaaatacttattgtgcttcttttgaagacaaatatacatctggtataactagtcgttctaatgaaactaaccaagttgatacagataacattcattgtgaagctgtaaaatgtaaatacaataaaaatgaactttgcaaagctgaaaaagttcatataaatgaaagaaatgcaagttgtgaaacttttgaaatgaaataaatttctttttatttaattctatagtatttatacaaagcaaaattgaacctatcaaatagatgtctttattaatgatgtctatttataggttcttttttaaaacaattcataatttatatataaaaataaattattattttaatatattacctagaagtaaatttaacacccagaatatccataaggaacataaatattggaactccaattagtaatccccatacacctaaataatgttctcctacaagtaaaataataaaaacaaaacaaactggaagtttagttctattcgacatcaacttagggtttaatatgtatgtttctactgcatgcactatacaaatcataagtaaaactccaaaaacctttgttattcctcctgtattaaatgctattacagttaatggaatcaaagacactataactcctgctactggaataagacccaacacaaaaatcataaatcctaaagcccatatttgagggaatcccatgaaacctaagaaaatcatagaaacaacagaatttataaaggcaatcataacttgtactttcattacttcaccaaaatttttaacaaagctctttccaaaaaatacaagcgaattataaataaaagaaatcttactatcagaaagtttatctccaaaatttttaatttcatttttttcaagtaaaaggagtaaactcagtaaaaatgccaataatatatttactccaaaacttccaacttttgttgctgttgatgctataagtagccctgcttgtgaaatatatttattaaaatccagctttgagacaataggatacaattttggtcctaaagattgagcaaattgatttacatcaaaatcactaaaaaccctactcagctctgtaagttgaactataattattggtacaactgcatagctaatcaatactaacaatatagcaaatagtgcatataacactataattatcaatgaatctggaatatttaaagaagaaaacttcttaattcgttttcttgtggctacaagcaagttatagaaaataaaagtcataataaatgttaaaagcaccatatttaacatataccaaaatgtaattagaataattactacgacagatatagaaacaattttatattttgaactatcacgtgccaatcctttgttatcttccatagtttaaatcctccccaaatttttatgactttataatgactgccctttttattttaatctcaaaaaacaagtagaaaaatactaaaaataacttattaattttcataaaacaatattaaaatttagagaagatacattttaaataatcttacttatactgaaatctgctctacatcatatatttaatttattattatctatctcatatagcaattcgtacatctctggatattcaaaaaacaaaccctcttttagtaattgtcttatttcatctgtgcttacccactttatatcacttacttcttcctcctgtaaaatagctttggatatatcatattcttttttaactaagtatacatcccaaagagtatcttcatgaatcatacttctaaaaactttcatctcatctttagttatatctatccctatttcttcctttgcttcgcgaattgctccttctaaactatcttccccagaaacaatacatccagttgtcattccccacatatttggcaatgtctttttacttttagaccttttctgaattaaaatttgagagttactatttaaaatccacacttcaactgccaaatggtaataaccttcttcaatagaattacctctttttataacatttcctgttttaattccatcagcattatataaatcccataattccatttcaaaatctcctgactttactataaattagataaactacaaatatattttagcataattaattctgctcattttttattacaatacttgatttacatttatgttcattgcttctcttttccttccattctcttatatcatctataataaatctatgtttcagcaactttgtgtcaaatttaaatattctaaacactatttgtaatacatatcctaaacctaaagcacttacaagcgtaccaatacctacagaacctcctaataaccacccaacaactaatgctagtatttcaagaattgttctaacaagacgtacagatttattagtttttttctgaagagcaatcataagcccatctctcggtccacttcctaaacaaacacctaagtatagaaaacttgctatagctgccaaaataattcctataacaaccataaacacacctatataagtgttgcttgcatgaggtatcactccagaaaatattactaaatcaataaaaattcctataaatgtcatgttgagtaaagtaccccatcctatattttcaccaaaaactgcatccaatataacaattacaactcctaccattatagaagcctgacctatagttatgcctagctttatagataaaccttggtgaagtacatcccaaggcataagacctacatgtgcattaatcataagcacagaagaaattgcaaatataaaaaaacctgaaaataatcttatcatactttttaaacttatttttcccatcaaaaatcactcctcataataataataacaataaataccaataaaatatatatataaatacgaaattttacagaattatttattagattaagataaaattttaattataaaaagtggcaatccaaattttatacattttcacctatactctaagctttcgtgtataaaaaacggatataccacttttttagtatataaacatttttaatttttcttattaattttcactataaattctagcttcttcttctccatttagtactcttaaagttccaaaagcaagtgattccaactcattttctcctgccataatttctactggtgctataaactcaactttctttttaaccattgaagtaaacatttcagaatatgcaattccacctgttataattatagcatctacctttccatctactacagttgctaactctccaataccttttgctaactgataagccattgcttcataaataatttttgcttcttcatttccttctgctatcattttttcaacttctctagcatctacagtatttaggtatgaaactataccacctttacctcttatctttttagtcatttctctttctgaatattgacctgaataacaggcagccactaattttgtagcaggtactcttcctgacctttctggagaaaatggtccttcatcatcagatagcatatcaaccattcttcctttttcatgaagataaatacttactcctccaccaatgtgagctactattaagtttaagctcttataatcttttcctttatccttagcatattttaaagccattgctctagtatttaatgcatgccctgcacttgatctatccattccacaaagtccagatattctcgctacatctataagctcatctactgcaacagaatcataaatatatgagttgattccaagaggttctgatattgcatgtgccacaacagcacctaaattggaagcgtgttcaagtactggtctatgtcttagtacatcaatcatttcttcatttactagatatgctcctgattttactggtggtaaaactccacctcttcctactattgcactaagagattttaagtctatactattttctttaagaatattcaaaactgcttccttacgcatttcaaactggtcttgtatagtattatattttgcaatctcttcagctggatggtctatcgtcttcacaagaatttgttcttctccatcatatactgctatttttgtagaagtagaacctggatttatggctaatattctgtaagtcataattttcttcctttcaccttaatttctatagtctatttatatctattataaactatttgctaaccatttccataccttcatggaaagcttttatgtttaattcaacaaattttggtttaacattttcacttataattttttcccaatcaatagactctaattgcatagatttaactagacatcctaataaaataacattcattatttttgaatttcctagttcttcagctttatcagctgcatttataacttttgcatttaatctacttaactctgcatctatatcactttcttgatattcagctcctccgattaaaacagtcatagaatctatcctatgattatttactaaagcttttccttctggttttaaataattgaaccatcttaaagcttccattttttcaaaagatactaatatatctgctccaccaatttctataactggagaatgaacacaatctccatatctaacttgtgaggaaactgaacctcctctttgactcattccatgtatttcactcatctttacatcatatccagcttccatcaatcccatagttaataatttactagcaagtatagttccttgacctcctacacctaccaaaagtatactcttagtcatattatttttcctccttaactattgcttgttttggacaaacttgtgcacatactccacatcctacacactgatttctatctatatttgataacttattctctttatcaaatgatagagctggacatccagttttcaaacataatttacatcctatacatttatcatggtcaactttacacttagtcttaaatggattattaaattcttctatatcttctttagagaattttttaagtacacatggccatcttgttattattactgatggttcatcttctatagctaaagcccaatctagtgcttcatttacttcttttaaattgttagggtttataactcttacatgttctattccacaagctttaactaatccttctatatcaacttctttagttttagcaccttgtaaagtataccctgaacctgggttttcttggtgacctgtcattccagttattctattatctaatataaccgaaatagaattacctctattgtaaacaacatctaaaagtccatttattcctgtatggaagaatgttgagtctccaagtacacctaccaatcttttttcattatcatccttcatattaagaactttttgagctccatgtgcagttccaaaagcagaacccatacaaacaacataatctattccattatatggaggagcaaatccaagagtataacaacctatatctccaccaactattaaattttttctctttccaagttcatagaagaatcctctatgtggacatcctgcacagaaacttggtggtcttggtgttactaattcagatttgtattctatagtatcatttgtttttccaaatatagcttttcttaaaacatctggtgtcatttctccatatggtggtattacatcttttccaatacaatctattccatatgcttttatttgttcttctataaatgggtcattttcttctataacatatattttatcaactttttctgcaaattcttttattttttcataaggtaatggatttgtaaatcctagtttcatatatgatgcattttttccaaaaacttctttggcaaaattacaacacataccagaagctataacacctatttttgtatcattcatttcatagtagtttaaatcagtttcatttgagaattttttaaggatttccattctttcttcaacaacgccccttcttatttgagcatttgctggaacagttaccattttcttagcatttttaacatactctttaatttcaacttcttctctatcatagcactccactaatccttttgaatgacaaagtcttgttgtaactctatataaaactggtgtatcgtatttttcactaacttcaaaagcttcttttatcatatctttagcttcttgactagttgatggttcaaataaaggtatctttgcaaattttgcatacatcctattatcttgctcattttgagatgaatgcattcccggctcatctgctgtaataagtaccataccaccatttacccctgtatatgcataagtaaatattggatcagctgcaacattcaaaccaacatgtttcatagaagccattgttcttgctcctgcaattgaaccccctatagcagcctcaagtgctaccttttcgtttggagcccactctgcaactattgcatctttatatgttgctatattttctaatatttctgtacttggagtccctggatatgcagatgcatatttaacaccagcctcataggctccacgtgcaattgcttcattacctgtcatcaattgtttcatataaaattccctccatctacaattattaaattcatagtccacccaatttgttcaatgaaattaattatttatttttacttctaaactttcaagtgcttcttttataatacttggtgctttcttacatttatcttcagaaactgcacaaactgcaaatcttaagcccatttttaatggaactgcaaataaattatgtttagtcaattcttcacatacttcttttggattatcacatggtatacttacaaagaaacctgctatatatggaagaatttctaatcctactctttcagcttcttctacaaatacatctgctcttctagtaagcatgtttttgtatatttctttttcatcctcatattctttgaattttttagggtcatttacaatgttagataatactgccatggcacttctattacaatttgaccaatttgctctacatgaatgaacacatgagtaatggaactcttcagctacatcttcacttgaagatatacaaattatagcccccattctcataccataagctgtaaatccttttgacatactgaatccaaccaatacgagaacgttttcaggcaaattagaaaatttcttaaaaaactttctacatacatcatcatcacctgcaaagtcaatatatgctgaatctacgaaaaatattatctttttgtctttatcttttgcgacttcttttgataagtctaatattttatcccactcatcatctgcaacactatatccagttggattatgcgctggtgtgtttataattgtaaagactctaccttgtttttctgctatatttacaaatttttctttgaacgactcaaaattaaaccttctattttcatcaaaaagttggtaattaactacttttctattagcctcttcagctatacttacatatggactccaaaaccaatcagatgttaatacctcatctccttcattagtatagttccatacagctaattttattgcaccacttcctcctggtgaagctaatactcttatatgtccttctggtaagtaatctctgaaaaatacttttttaactgcttctaagtagtctggttgaccttcaagagctgcatatgcacctatctcacagttatctaatgctttatattcttcatatacagttttcattgttattaattttcctgaatcatccattagagcgcctattgttgcatttattacattatccataccaaaagccttctctgctgcttgagctctaccagatatgctaaatataacatcattttcttttggccacattgcatgcttaccaaccatactttgactcataccatcacccctaaaattgtatttactcttacattatatattaagcaattactatgccaataaatcccactttatgtaaaattgattttgtttagaattattatttttttcattattaaattaagtgttttaactatttttcttataaatatatatgcctgtctaaaaaaataaaaatttacaaaaaagtaatgttaatttttcttaacacttgttttaaaaaattaacattacttcaaaataatttatatgtaattatatttaaatatttttattgtatttcttccataaagatgtcctgcttattccaagaacttgtgcaacttcatttttagaaagtccctgagcaaaaagcatacttattattttttcttcaacatacttatttacttcttttatatctatacttatcttaccatcatttatcttacttatatttatagattcatcttggacttctacacttgctgtcgtttcagaattaaatttgtctacttcagagttaggaagtaattttttagttttaaaatctctatcttgtctcaatttaattttacctgtcacaacatatttttgagctattgtctttaactctcttacatttccaggccagctataattatatagcttatccatttcatctttagtcaaaacaaaattttcatctatactgtttattccattgagaccatcatcctttaatacttcatttacaaaattgttaaacaaaggtattatatcttctcttctgtctcttaaaggaggtatatttatctctaaactactcaatctataaaataagtctgctctaaatgtacccataactattttttcggttaaagattcgttcgttgctgctataatccttatatccagaggtattatataatcagaaccaattctcattatttgacgttcctctattactcttaatagttttgtctgaatattaaaggatagactatttatttcatctaaaaaaagagtccctccatgagcaagttcaaatagtcctctttttccaccctttctagcaccagtaaatgcaccttcttcatagccaaaaagttcactttcaagtaaattttctgctatagtagcacaatttatagcaacaaaaggcctatcttttcttttacttatattgtgtatactatgagctataatttctttaccagacccactttctccataaagtaaagttgtataatcactttttccaatttttttagcttcttcaataaattctctagttaatttatctttaaataaaaaatcatcaaaagtatatctagcatagagacctttttgattcaagtcaaatcttatttttctttctaagttttgtagcttggttatatcttgtattattcctaaaactccataagtactattatcaacttttattaatgttgtcctagtattaacaattagattatttatatttcttatctttctatcttctacatcctctttttcatgtaaacaatctaacatccactccattttaggaaatacatctaagatgtatttattaagtgcacattttctctctactttaagcatgttttttgcactttcattgtacaaaattatactaccattactatctatagcaattactccatcttttataccatcaagtatatttcgtaacacttcattattaaacttttcttcacctaatgtatccaataattttttacaatattctacagcttctcttatagattcatcactagcagttgcaaatacactatcaattccatattgccttgcaaaagaacatgccaaacctcctcctacgattacaacttcatctttttggtctatatattttacaactttacttcttatctcatacttagattcaaaccattcttcagttatttcagtacttatgacatttctccagccaacatagtcaaaagaaacttcattgtctccaagaatcaatactacttttttagaatatttctttgctatttctattgctcttaaaaggtcagttgacttcatattcattggtataacaggtacatttactgtatctattactaaactataacctccacctctaccaattatagcttgggcacctttttcaacaagtatacgaccttgattttccattaagtctaggttaagtatgtcgattattatagttccattttctacatcttctctatataattcttctattctttcttttaattcaatatcagaggctataattcctattttttttcgcaacaaaatcacctcaattttaaattataatgtattgatttctacctgctttttttgatttatataggttcttatctgcatcttcaattaatatttcaacatcttttctactacgacatctttttatacttactccagcacttatagttatatagttttttattttagaatatatatgttcaataccctcaaattcaagaagtttgaaaactcttttaatatataattctatattatcaatctcttcaacaccgattgattctatagaatctactagtattaaaatttcttctcccccatatctgattatatgttcggtaatatctataaatacacttcttataatatcagttaccttaactataactttatctcctgctagatgaccataattatcattataacttttaaaacaatctatatcgactagtattgcaaccatatttttgtctctggttccattaaataaatccaactgctgttccaaatatcttctattatatagtttagtaagtccatcttttaaaatatcattttctaatttcttattatcatccactagtaatcttaaactctcttgtttttgtctgagttcatattgtttgtgaattgcttgagatgttttataggaattatttttttcccacctatcagaataccaatccatacttttataatattctattgccagtttaaaatctttttttagctcatatccatttgctattagcccataaaatatagatatttttctaagattcaatgaactctttttaactaaatttaaaccttttatataacaacttataccttcatctatattaccaaattttatatataaatctccatacaacttatatatgtaatctagtttagaattatatataaaaacatcgccaaaacttttatatatattttttgataaaattaaataggtatttaccttttcaaaactacaattatctttccttaactcaatttcagctgaatataaaaatataaatgaatataaataatccttatatacaccttcaacaactttcattaattttatagtctttaataaaataacttctgcttctttattcatatcttcttttaaatatgcccatataaggtctatctttatagacactctttcagttactgatattgagttcttactgtgcgcaacatctaatacattatttatgtattttatagcttctacattatttccactctctaaataacacaaacttattatacatttacaaaaagcctctatagaatataaattattttcttgagccagttttagacattcaattaggtactccatactttttataaagttattaaataaatatagataaactctcccaaatatataatttgccctacttacaagagctttattttttaaagttttaaaaaaagacacttcttctactaaagctattacatccgttttggtctgatataaagcacttatttctacacataaactcatatttaacaagactagcaactcatttaaatgattttgtcttataactttttttgctgagaaataaaaattatttgccttatcatattttcttatagaaatagctgataaagtaagataaatataaattttagatattatatctgaatcttcttttaatgacaattttttaatatactttaatgactctatcaaatagttgtatgatgcttctctatctttttttatatagtttataaggctaattaaatataaagtatagactctactattatcttctagttttgtatttaaaaggtctttgtgataatccaagatgtagtttaaatctgtcaaatttagatagaatttagtcaacatatcgtattctatcttgtttatatttctctttaaatcttctattaaactccttttcaagtaaatcaccaatcctatttcaacagttaaaaattcttaaaatcatgataatgcaaacatctatttctaccactttcctttgctttatataaagctttatcagcattttcaattatttctcttatatctatactactatttttacatgtatcaatgccaatactaactgtcaaattattgtttaaaaatttctttacaatcctacataattttcttccaaatattttgctttttttataatctttacatacagataatatcagaaattcttctccaccataccttatcataaacatgtctttttttagatatttttttattattatagttatatttttaagagcaatatctccattatagtgtccataagtatcattgtattctttaaagtaatctacatctatcataaatgctgtgcaatattcactaacttcttgtttttctaaaaaatcgttcaaaaaagttctattatatgcacttgtcaaatggtcaacatatttttttttatctaaatcaagttttacttttctcatgttatttatttctgtttctatatactcatgtctataatttaaggaatctatataatttctatttcgagcttttatatacatcatttttaactcataatacattttaaagtatttcatactcatttcataattttgaatcttttcaaaacacaaatatatattcttgtatgctaacttcacataattataatttttagcatttttagatttttcaaggagttttttatttgtgtttaaggcattgtcataatatccaaagatataatatatctttgcctgatgataaattatttctaaatcatatattgtatattcttctatattttttatcatatttaagatgtttttagctctatctaaatagcatattgattgttcaaaagatttttcattactttttgcataatacatagctaaacttataaataaatcaaacttctctacttcttttaagctctgatttttaattttttctagatatacttcagattttgctaaattatttattgctacaggataatttctagtctttattaatattttagttatgttgtttgatgctctatatttttgaattatatttacatttctatactttttattgcttattacttcatttaaatattctatggaacattcataattttcaaatgaacattcacactcacctatctttatattacatagtgaagatacttgcatatcctttagtaaatctgcatattttcttgcttttaaaaaatttactttagcaattagagcatcatccaaaaacaaaaaatatattttaccaataataaaaaaatatatttttttacagttaaaatcgttaatttcttttatctttatatacaatgtttctatttctttaattattacagaagattctatacacttacttgccttaatgtaaataagttgtgatttaaaaataatttcttcaattagaaaattattttcatcacaaataagattaaatttatccatatataaatttgccttatttacatcttcattttttaaacttaaaatagctatttgtgaataaaatcgtgctaaaaatttataatctttgggtaagcatttatcaatatatttacaggaaatcaaaatatactctttcattttttcactaaacccttgaataccatataataaagctagcaaaaaatttgattttaataacattaaactattttgttcagttttatagcaatcaattaaattctttactacaccaattttattttcaacaaaatcgttattagtcaataatctttcattcaaggttagtttaaacattgaatctaaaattgtatcatctatctcttccaaatatttactatatattgtaactcacctccgacttacattatctcataaatttagtaattttccatactatttttgaaaaaaattgatgtctcaatttagaaatttctcttaaattaagacatactttacactaaactatacaattttctatctgaactatataatcctgacaattttcacaaattatcacacttacaatataactattatcaactttatttgcccttgatagtttattaaaagatagtcctttataatcaacagatatattgcttattacatattctccatctttactgaaaatataaaagtgatattctaaaaaaggaaagaattttttcttttcttttactccttctaaacataatggacatgcttcttgataatattctacatcaaaatcaacttcttctgcttcattaagtatatcaattatttttgaaatacttactccttgaactggattttcttcatcatttattaaagcactacagttctcctcttttaataaatattccttatcatcatatataaacttgtataaactcatattatatcctccttataattattaatctccaagttattctaccacttaaataaagttaataaaagtaattgtttataatctttataattaagttatgtatacatatattcctatacactatcttaattaatgattttaaaatccaagtttacactttgaacatccagtttcccaaaatctattgtcaaaactcactttagttattaatataaggatataaatatataactgcatagatgttacacacttaactatttaatatgatacgatttagtatctaaatttatatattgtatatagggggagatatatatgtataaagataaaagtgatgaatgtatacacttaatgactgcatacatcgatagtataagtggatattattcatttattgacacacaattagaagattttatggtgaaatatggtgaaaacattgttgattcaaatttacacagtataatgatgttgctttgtaaatggggattatcttagcattttaagaaacttttttgtatattgtattctatattatttattcattaataaaaaaagattgacataaacttaaaagctatatatagatttctttaaaaatctatatatagcttttttaattttttcaaaatgtatacttaaataagttagttttttttcaaaatttgactatctaatatgatataatttaactatctacaacaataaaaaatatctaatatgtattatctagtttagctcatcataataacatccctatatttacaattaagatattttcaatatagtaatactcaattttaatattataaaaaggagagattttgtatgaattacaatgacttactaaaatcagctagagagaactttaatggaacatgtaaagtatgtaaaatttgtaatggattagcttgtgctggagatgttcctggtatgggtggtaaaggaagtggttcgtctttcattgaaaatagaaaaagtctagaaaaaataaagataaatatgagagttatacataatgtttcaaagccagatacatccatagaattatttggtagaaaaatgagttctcctatattcgctgcacctgtatcaggtactctattgaacatgggtggtaaagtttccgaaaaagaatacatagagcctgttgttagaggttgttctaattctggaatttatgctatggttggcgatactaatgtagatacttttttactggataatttagatgtgttgaaagataatagtggaaatggaattgtatttataaagccttggaataattcaaagataatagaaaaaattagattgtctgaagaagcaggtgcttttgcagttggtgtagaccttgatgcttgtggacttattaataatcaatttcaagaaaatcctttttctcctaagacaattgatgagattagagaattggttgaatctactaaattaccttttattataaaaggaattatgactgtagatgatgctttgatggctgtagagtctggtgctagtgccattattgtttcaaatcatggtggaagagtacttgattatactcctggtacttgtgaggtacttccagatatagctaagtctgtaaagggaaagataacaatacttgttgatggtggagttaggactggtgttgatgtagttaagatgcttggattgggtgctgatgctgttttgatgggaagaccttttgttactgcttcttttggcggtggtcttgatggtgtggagttttttatagagaaggttaggaatgagttatgtgagactatgattttgactggttgtcaaaatgttaaggatatagatggtagagttatatggaatttattgtaaaatatttctagactctaagatactgattaatatattctatataaaaaagttgtcgccctatttcttagtgcgacaacctcttttctaataacgctctccgacagcttgccaagtggcttttccaacaacaccatcttttgttacaccaagtcttccttgaagtatttttacttgattatatgtagcaggtccaaatttactatctggatcaatatcagaaccatttatttgttgacataaaagttgtactaaatgcacaggattccctttttctacatgtccatatcctactacagtggtatttatatttacgctataacttataggaccagtagcatcaaaacgatttaaatcttttttatatctaataataaatgcttttggttcaatattataatcatctatattaatattatatgaatctataaatttttcattaataaagattgtatcatctttagatggatttatatttaattctttacatttttttcataatcagattttataggttgtggtacattttcataaataaattcgtaaccagttattgtaaatgaatttgttgtttgctcttcattactttttcatacatttacatcattattagtatttgcaaatactaaactaatagatattagagtcaccctccctgtgactactaagattttttttagatttttaatttcaaaacttctcctaatttgttaataaattataatactataaaaatctattaatttacaactctcatgctaatatcatcttcttccttaagatctgcgcctgttttttctaaaatccctatatttcttaaataatttgaattatcaaaactaatactttcaaaattaaaatatgtaactgaaaataatgtaaacaaaatcaataacatcaatattccacttttcccttttttcttaataatactatcaagtctcttttccaaatttgtcttattaaattcagttgttaaaataccactattataattcttactaagtttaattgactttataagtgctaacgcatatgctttcttatcttttaaagagcaatcagtcaaaacactttcatcacaacataattcacaatctagatttactttattgctcattatataaacaagtggattaaaccaatacattattttaacagacaaaactaaaaactttattaaaatatctttgtttttaaaatgcattaattcatgtttcaaaatccaagttaactcatctttactataagtatagtctggtaagaatatgtaagatttaaataatcccatacctgctggacttatcaattcatcagaacctcttaactcaattttcttttttatgtctaattcttttaacaaatttttatagatacaatttacatcatgatcttcaatatcataagatacatcaacaacgagatttttaaattttgtgtattccataaatgtataaactgcaatggctatagttacaaataaccataaataaactaaatacagcataaaatcattatctatagaaacatcaatttgtgtaatattatttcctactgtattttccttgggctcttttacttcatacattactgtataattaaatagaaaaagtaacattctaaagactattaccaaccaaatataataattaaatctcttactaaacctcttaaaaaaatatcttttcaaaaataataatagacaaataccaaaactacatacaatagttgtctttataagattgtcaaaaacatatagcatataattattcattctttaaattatcaaaataactttctaaaaaatctagcgtgtctttacctatattttcatcatcatgtaatgctgaaattaagcttttcaaagaatcatcatgtatattacttaggaaatcctttgtctcaaaacttaaataatctttgtgttttactattactgtgtaatgtgtatatctgtctattttttgagcatttaagaatcctctttttactaacctcgataaaagtgttagtgtagtggtttgtttccaaccatatttttgttccataacttcaataacatcttttgatgtcactgtagcatctactttccaaataaatttcattacttttagttctgcttgtggtatttttcttatcatcatttacacctccctcaaaactcttgctactttaagtctacaatatgtgaattttttagtcaaacgctttatgaaaaaatgtggatttttgtactttttattaattttctaattttttaaaatactaaaagttagattttaaaatatagttgttcaagtattttgctttttacatatttaattataatagtgcagaatgttatttccacattaaaattatttaataaaaattcctatattttcacacaaggaatattataatacttttttttaaataaactagagtaatatctaataaattttaacaatctcctaattgtacctttgtgttattaaaatatctgttttatataagtttatgttataagtaaaattatacatagcaaataaaggtataaaaacaccattttcagtgtctttaaaataaagtttgtattcttctaaaaagttgtgataattaaaatatcactactatacaaaggaagatgttcactttttatgtttaacaaaaactaaaatattaaaaaaatttattgaagaatatgatgccaaaacaattacagatattcaagatatactaaaagatttatttgaaagtacaatccattaaatgttagaagcggagcttaatgaacttttaggttatgatagaaaatgatatattaggaataaaaaatcaagtgattggaatatactcaaaaggcatgtctactcaaaatatattaagtcatcttaaaagtacttatggaattgatattatctcattcactaataactaaaactactgataaagttattcctttaactcataaatggtaacttagacctcttaatataatttattcaattgtatttatagatgctatacattataaagttagaagtgaggtcgaataataaacaaaacagtctatatagctatatgtagcataaaagaggttttaagaatatggattggagaaaatgaaatttcaaagtattggctaaaagtgcttatagatgctagaaacatgggaattaaagatgtattaatagcagcttctatagatagactagttgaattttctaatgcaattaaagcgatatttcctgatacttaagtacaaagatatgttgtgcatcaaattaaaaatactttaaattatgtatcatataaaaatagaaaagaatctgtaaaagatttaaagaaagatatgctacaattacagaagaggtagcattaagtgagctatcactagagaaaaaatagtacaatcaatatacaatagtattaagaggttggtgaaacaattggaatgaattagtaacatattttaagtactctcaagaaataaatacatcgatatatactacaaattcaatgggaagttagaatagattattaagaaaagttactaaattgaaatctatttttactttggataattatttgcacaaatcactatacttaacaaccatatatatttcttaaaaatggactcagaaaattagaaattgtgctcaaattttagctcatttaagtatttattttgaagaaagaaatttttcaaaaaaacaagaaattttcttaaagggttaatagcttttgcaaaaatggaaaagatatcaaaataaggctatgatttttaaagccatagccctattagtaaaaatttaattatcacttaaaaaataaatttttatttaaagaatacatgtaaatgtttacagattcagcaatttaaaattatctgtgcaatagctttctttttaaagacgtcttccagctgcatcccaagtacttcttccaacaattccatctcttgttaatccaagtcttccttgaagtgacttaactgcattatatgtagcaggtccaaattcactatcatcatcaatacttgaaccatctaaggttctacataaaagttgaactaaatgcacaggattacctgattcaacacgattatatccgactacagtattacttacatttaatgtataactcttaggtccagtaacttcaaaaacataaccttttttatatctaataatatatgcttttggctcaacatagttttctacatcatttgcatctatagaatctttgttaacaaaaattatatcatttttagatggttttatatttagcgcttcacattttttttcataatcaaattttacagattgtggtgcgttttcatatgtaaattcataaccagttatagtacatgaacttattattgaatcatcatcctttgatgtatctacatcagtagtagtatttgcaaataccaaactagtagatattagagttagacaacctgtaattattaaaattttttttaaatttttcatttcataattcctcctaatttattaataatacgacaatataccttttcattacatacattaatctattaatttataactctcatgctaatatcatcttcttccttaagatctactcctgatttttgtaaaatccccatattccttaaagaatttgaattatcaaaactaatactttcaaaattaaaatatgtaactgaaaataatgtaatcaaaatcaataacaccaatattccatttttaccttttttcttaacaatactgtcaagtctcttttccagacttgtcttattaaactctgttgttaaaataccactattataattcttactaagtttaattgactttataagtgctaatgcatactccttcttatcctttaaagaacaatcagtcaaaacactttcatcacaacataattcacaatctagatttactttattgctcattacataaacaagtggattaaaccaatatattattctaacagataacactaaaaactttattaaaatatctttatttttaaaatgcattaattcatgtttcaaaatccaagttagttcatctttactataaggatagtctggtaagaatatgtaagatttaaataatcccatgcctgctgggcttatcaattcatcagaacctcttaattcaattttcttttttatatttaattctttcaacaagtttttgtagatacagtttacatcattatcttcaatatcataagatacatcaacaactagatttttaaatcttgtatactttataaatgtataaactgcaatgactatagttacaactaaccataaataagctacatacaacataagattattatctgtagaaatatcaatttgtgtaatattatttcctactgcattttctttgggttcttttacttcatacactattgtataattaaatagaaaaagtaacattctaaagactattatcaaccaaatataataattgaatctcttactaaacttcttaaataaatatcttttcaaaaataataatagacaaataccaagactacatacaatagttgtctttataagattttcaaaaacatatagcatataattattcatcctttaagttatcaaaataactttctagaaaatctagcttatctttacctatattttcatcatcatgtaatgctgaaattaagcttctcaaagagtcatcatgtatattacttaggaaatcctttgtctcaaaacttaaataatctttgtgttttactcttattgtgtaatgtgtatatctgtctattttttgagcatctaagaatcctctttttaccagcctagataaaagtgtcagtgtagtagtttgtttccagccatatttttgttccatagcttcaataacatcttttgatgtcactgtaacatctactttccaaatgaatttcattacttttagttctgcttgtggtatttttcttatcattatttacacctccctcaaaactcctgctaccttaattctacaacatgtgaattttttagtcaaacactttatgaaaaaaatgtgaatttttgtactttttgttaaatttctaatttttttacaatattaaaagttagattttaaaatatatctatttaaatattttactttttacatatttaattacaatagtgtagaatgttatttacacattaaaactatttaataaaaattcctatattttcacacaaggaatattataatacttttttttaaaataaactagagtaatatctaataaattttaataaccttctaaattatgcctttatgctattaaaacatctattttatactgattatttacaaatatatctaaattaattataaattttattgaataagacttttataattatacctttaataaattataaaaaagcacttttataaaaaaatgtgcttttaatatctactaataaagttctttattttaattaaaacataattatattttagtattataatcttttaattttagcattatagtttatgtattataccctaatatattttattttaaattactagttaatcactcttttctggttatttatctcctatatattaaagtgtcacacctaaatagttaaatcattatcctcttttatctttattgcctttacaaatccatctgcaattacaaaactcataagagaagttataaaatatacaaatactggaacagtaaaataaaatccaaatcctaaatctaggaatctcattccttttccagtagtaccaaaagttgaaataaactccattatagagtttaaaagcaaaagatatccaataatcctaaatctttttacattatcttttacaaataagctatgttcagaactacttaatacttctatcaatgattttataatgataaaatatgatacacctaaaataaacattaatattccagaaatagtgccttgtagagttgcttctccactaaaacagaggtacataaaacttttaaatcctcccacaacaattactaaccctaaaagaaaaaataaaatttgtaatataccacttagtaaattttttataagtttattaggcatcataccaactcctttaaaatattttatatatagtataatacattatattatatcgtttttcaataaaaatattataattaacaatatatttttattgttaattatgcaaataaaaaagagtataataaaagcctttaaaatacatttttttcttattttaaaggctttttatattctacatttttattttctatattatatcctttgataatcgttacatctaaaatagaacttattaccctaaatataagtatctttataactagaatagtccattacaacagcatctccagattaatccactgatacctctttattatcaatatctaaaattgaaattttacaattcccacccaatttttcttgaactattttagctaattcatttaaagcattttcaaattctttaaatctactttcatctactaattcaatgcataaaaaggcattgttagtatcttcagtaagcattgttctcactgcttcacgccaattccaacatctacaaattgctccaccatcatctttataaattatttctccttcatatggaaatgaattttcatctgtccctagtgggataaactcctcattaccaattgctctagttagcctaatatctcctataaatttatctatatcctcccctccacaaggtaatgcatattttaatgagataaaattgtagatatccactaaagggttaatagttcctatattatttccattatgaactctttttaataatgcttcaatagaagaccttgctccttttttcgttttaaattttttaaatgcctctctccatactttaatcacttggttgttgctaaattctgagtcctccaagtattttaatgcttcttcttctcccttcaaaattattttcttatagtcttcatcttttatagagttatctatatcattacaaataataactccaatttttgcactaggaaatagattccaaaatgcatcctcaataacaaattttttcattagaaaacctcctcaaatttaaaatatgtaaaaataaaaaagcctatagaaatattattaaatatctcccaggcttttatccttccgtgtacacaacaattgcgcgttttctcttggacctgaccattataaaatgcggaaccctagaaaactaaattataagttttttaatttacaaaatacaattaaattttagcataatatagcatttaaaacaatattctattatctagtttgtacattaaaacaatttgccattagattataattatggtggcaaatgggtggcaaatcaccttttttattacatttttgtttgtttaaactattgaaaatactatattcttacaattttaatcaatttctgatttaaatggagtgtcatcagcttttgctattctatactccttatcagttatataaccaagctgatgcatcttatacagtacaatcacttgtctcttcttagcctctccatggtcaatataccttgcaggattatttgtcataccagctaacatagcacactcagctaaatttaattcactaacttttttaccaaagtagacttcagctccctttgcagctccatatgcatttttacctagatacatattatttaaatatgcctcaagaatttcatccttagtcataatcttattcatctgcttagcattatacatatcccttattttccgcttcatagttttatcattactagtaagcaggttttttgaaacttgcatatctatagtacttgcaccttgtgttgtatctgtaaacacattgtttaatactgacctaactagagaaataacatctactcctttatgcttataaaatctctcatcttctatggaaactattgcatgttttaaatcatttggcatttgttttatacttacaacctcactacttatatatttagacctaattaactttttagtaacttctggtgacccttttatagctgaaactgtaaatattgcacctgccactgaaaatataattagtgcaactaacataatagataataatgccctaactattctaatccttttttgtttttttctttttttactttttaattttttctctctttgtttatactcgactcttcttctttctctttgattgtaatctgtatttaaaggtcttacattatctcttgtaaaactatctctatctctttttataagattctgtgaatctactttttcactcattcttttactggaacttgtattaggacttttattttttttatttgccgaagtataagaatgtttagattttttattactatctttgttgttactaatttttttacgtcttattttattattatcattatcattgtaataacccattttagtctcccttcttcatataaggtacattatacattgttctacaaaataaatcaaagaacaaaattgtaagcttaagggtcaattttataaaggatattttcactaattttctctatatttataattaatattcatcttttattttcaaaaatagttttgcagttgctaatgtatcactgtcagctctatgagcatttatattctctatgttgtaataagcacaagctgtttcaagtttcttgttttttcctttataacttttacatttttttaataattctactgtacatatataattgtttattggttctaaatctaacatcctaagatagtaatttaaaaattttaaatcaaatttcgcattgtgtgcaattatagttctatcacctatgtattttctaaatctaggtaaaactaattctagtggttcttcattttctaccatttcattacttatatgtgtcaattctgttataaatgaagaaattatccccttaggttttatcaaccttgaatagttttttacaatttgttcattttttatttctgttattcctatttctattatttcacaacctttatatggatctaatcctgtagtttctaaatccacaactacatattctttcatatctcttctccttattattaaatggatatatttatattctatatttatgtaatagactaatcaatacttaattttatatgatataggaagattttacaaattacaacatagatatatcctatattccatcataaataaagatttttttattagaataattaaacttttaatttattgttatttaatctattttgataaacattatttattttattattatttaaatctttaaaatctaaacttttacattgttcatcattttcccatattcctgcttgtttatttccatcatttttatataatacacccttaccatttttcttattatctaaaaaatatcccttataaatgtcattattgggatatgttaattttcccaaaccattttttaatccgtatttaaattcacctgtatatattgaaccatctctataagtatattttcctattccatgcatcttgtcatctttccataatccttcatacttttccttacttgaaaaaatatatattccaaatccatttttctttccatcaacaaactcacctttatataaatcaccattatcgtatttaaatactttttcttcctttaatttcttattgttactcttatttttattattattgttatcctttatatgtatttcttctcttctggcttcaataaaatctctatcatacctaaatccgtttcttgatttaattttttgattaatcttcttcttattaataaatactctagctagttgagtaaatataaatacagatgataagcatataaatacacatagtattgttgtaaaataactagttatattttccataaaaaatcaccctttaaaaaatttatttaaaatacctaatataatatatatttttattaaatgttatttatacttttatagtactatattgaataaaattaactttgaaattatttacattaaaataaatcaaatacaaatgccataaattaagtgtttctagttagcataaaaatacttataaagtatgctcaaatatttcaaataaatacttttattcaaataaatctctacttatataagtgcttatataaataaaaagatgaactatagtaaatatagttcatcttttttataatagtatttatttaaaattaatatttatttagttagtagcatctacttagatatcagataagaaagcacagtcatttacttataataagttcttttcatatattttttattataattattcttttacaagaacttttataatttctgaaatgtacatagtatgatagtctttctctggataccattttttatcattttctttagcatcaaagttttctggtggcatattaccatgatatagctttttacatactataatcatattagcttcttcaaaagctaccgtatcatccacaaaatatggtgtaagtcctgctttttctattttatttatatctctaccagaaatagtaccacaaatatttaaagcctctctatacgtttcatcaaagaaggcaactgtaaatgtatcattactatctacaaattcttttgtatatctctgtggtcttatgtaagttgtaacaacatttttaccccaatagactccaacaccaccccagctagcagtcattgtgttaaacttttctgaatcaccagctgttataagtaaccattctttgccaatcttagtaaatggattaaactgtagttcctcaatttttacttctctaaaacccatgacttcatcctacccttcattttttaattatataaattaattgttaaaaatttgaatatatgtactcttataatactgacttttgattgtcctacataattcatgtaaattataatacaacaaatcaattactttcgcaataagtagttttcatattttataagtgtaaaatatagataaaatatattgattataaagtatataatatatttttaaacctaaagcaatatacaataaaaaaatgtagaaagtaagtatctctctacattttttattatatattatttttatattaatttaattttatcttgattcagttttataaaaaattgttataattgtcaagttctactctattatttgtaatttcttatatcttgttaacaacatttaagttattacatttatttatatatattttttcattatctaagtcttcatcaaacatttttattatattttttatctcatacttgtactcatcttcattcattctataaagcattaaatcttctaatacatctttcatgtcgaggtacacatcttctaataaataaaaatagccttcctctatatctttcaatttatctatagtatccatttttttatttatatctttcataatttctaaattttgtatatttacatctatgattgttaataagtacattctcacagtttttattatttcaacagaaaaatctacaatattataatttccttcttttttatataatgactccttaaatttgttaaaacaattatctaaattagaatttatatcgttaaatggtggtcttattatgtcacgtattattaaaagattttgtatatctacattatttgtgattgcctcatccaaaataaataaattatatgcatcatttaatgggtcatgggcatctccactaaactctaagttaacaaattcaagtaaatttttcaatgatatatagttcatacatctcataccacaatttatatatttttcttttatatctacaaataaatctctaatattatttacaaaccttggatggttattttttttagcacttctcatatctgtgttattgaaacatgtcaaatccaaattaccaaaagtatatattcctttaatatcagaaaatatgccaagccattttttaaattttctcatgacctcttcataacttggtgcactcttcaattcttcagaagatatatgtgttaattcttgtatatgaggatataactcctcattacttactggtcttattaaagatttaaatttatcaatattttttgttttttcatcatacataactgctccgattgcaattatatcagaattaaatactgctctttttgatttagaatttggcatattcatttcaaaatctatatatactcttttcaatataaacaccctttccaattgtttatagtgattctttttaactatttttattcaaaattttctaagaaagaatgtttctccccatctttttgccaaccaagtactgaatcaagatttacattttctgctgccttaaatatagatttttctacatttttaaaatttgattctaagctctttattaagtcttttatctcatatcttttattacctgtttttttagcagcaaccatacatgcacaatttaatggccatataccactattttgaataaatcttataatatgttcttctcttatataataaagtggtcttataatttttataccttcaaaattagtagaattaagtttaggaagcattgttttaaaatttccagcacacaataagttaagcattgttgtctctattacatcatcataatgatgacctaatgcaagtttgttacaccctaattcttctgcctttgaatataatgctcctctcctcattcttgcacacatatagcatggataatcttttgctatttcatctgctatctcaaatattcttgaatcaaataaatgtattggtatatttagatactcacaattatctataagtaattgtcttatatttgcatggtatccagggtccatagcaataaattcaacatcaaaattaacttgtccatgtttttttaactcttgaaacattttagccataagaatactgtcttttccaccagaaatcgctacagctatcttatccccttcttcaaccaatttataatctcttattgacttcataaacttagaccataaattttttctatatttctttattatacttttttctatatctcttactggaagtctttcctcaaaaggaactataatttcacagccttttcctgatagttcactcatctaatcacctcgtatatttatgtatatttatgttaataatattttacaaaaaagtctaccttcatccacaaaatactataatttttactttaattttactaaataatttatagtttacaataacacataaacttataataacataaataacctctttcttttattatcttttttatttttctcatttaatattttattattagtaacgatttttaaatgattgaatattatacactagatagagttacctatctatttacaacaaggaggttttcatcttggaaaataagactagagatatcaaaaaaaattgtggtccatctttggctagaccatacattaataatcaaattttcacagaaatgtactgcctttctgatgcattaaaatttggaactatatttccagaactaaacttactagagtctgaaatgtacaacaaagaattatatgctaagccaaaaaaatatagaggaggtagaagataatgaaagactcatctagagctgaacttatgagaaaagttcaggaaacatcttttgcatgtgttgatatgaacttatatttagacaatcaccctgatgataaaaatgctatcaacacttataattcattatgtaatcaatttgcgcaagctagatatgcttacgaaaataaatacggtcctttaactaactttgggtatgctccaagtagatgcccttggcaatgggctgaccaaccttggccttgggacagagaatttaattattagacatcaagtattggaggattgaaaattcatgtggatatatcagaaaactatacaacacccagttaatataaaaacttgtgaccctagaatggctaaatttcttataactcaatttggtgggccaaatggagaacttgctgcatctttaagatatttaagccaaagatatacaatgcctactggtaatatgcgtgcacttttaacagatattggtacagaagagctagctcacgttgagcttatatgtactatggtttatcaattaacttctgatgcaagcccagaagagttaaaagctgcaggtcttggttcaaactatgctcaaaatggatatggaatttatccaacagattcaaatggtgttccatttgatgtaagacctatagcagttatgtcaaatcccgtaaccgacttacatgaggatatggcagctgaacaaaaagcacttgcaacttattatcaacttataaacctaacagatgacgttgatgttatagatgtattaaaattcttaggtcaaagagaaataattcactatcaaagatttggtgaagctttaatggatgcttacgagttagaagaatctcaaaaaatgttctaaaatttttatttgtataactattattatttgataatttataatttactgttgtgttaaaatttataaaaaatataaatataatttattttctataaacagagaaaataaataaaaagcaggtatcaatcaaatagtaacatgtattatactatacattactatcaatattgtacctgctttcatattataagcaataaagaaaaatctatttattaggttttataataaaacaattataaaactcttcttgcatttacatatctacttgaatagtagctactatttatattagatattgttactttttttgatgaacctgaagatgcatgtatcatatctccatttcctatgtatattccaacatgacttacagaaccattatttgaaccttgtgtatcaaagaatactaaatctccacttctaaggtctcctctatttacatatgttccatacttactttggtctctagatactcttggtatactaactcctgcagattttttcataacgtactgtgtgaatccagaacagtcaaaactatttggaccttctgctccccatacatatggttttccaagtagtgtctttgcaaaacttattacactatcagctccttgacttggagaattagtcgaataagatggaattgaagtatcaacagaacctttttcagcaaggtattgacttgacacatatccagtttgattgccataacttacttttgtccatcctccactttcagaaatacttccaacctcagtaccataacttaatgtagctattttagaatgacttgtacctggtcctgttctaacgttcaatgactttgctgttacaacctttgtaccctttacaaggtcatttgaactgttttcaacattttcatttgtagagtcatttacactagttcctaaatatttacttgaaacataacctactctaccattagaacttatttttgaccatccatttgactcagatatgtatccgacttcagtcccatatcctagtgttgatattttagaactacttgtacttggtcctgttctaaaatttaatccttttgctgttacaacttttgtcgacttaactgaagtatcactactttcattgctacttccaaggctatttattgctacataatttccatgcacataacctgtgtttccattatatttaacttttacccaagaaccttcttttcctacgtactcaactttatcacctttgtaaagtttccccattgattcatggtttgtacctggtccttttctaaaatttaccgcattccctgttattgttctgctttctatactcacactctctacttcagactcattagcatatgctaaattccccatagtaggcattattatcgcagttgccattatactggctgctattctcttttgattaaaattcataactttccactcatctcctcttttctactatctttatttcacttcaaaatataaaagaaataattgacactattaaaatatcaattatttcttttatattaatattattacaaatttgtaactatttgtctatagtaatatttgcttaccataaattaccatgtataaattttaatcttcaatagcctgtaatttagtaatatagccatcttttaccttttttaaaaatggctatattttttaacttttttgtaactttttaaaatccagttgagccaaacccaccttttcctctttcggagtcacttaattcttttacttcttctatgttaatatcatagataggttttactatcatttgagcaattttcatatgcttttcaaccttaaaatcatttttcccatgatttattaatataattttaagctctcctctgtatccttcgtcaatagttcctggtgtatttaatacagtaacagaatgctttaaggcaagcccacttctaggtcttacctgcgcttctgtcatagtaggaagctctatacatatcccagttttgataagtttagtctctccaggaggtattacaacctcttctatagaatacaaatccataccagcatcacctttgtgagcaaaattaggtattatagcatcatcatttaatttttttacttttaaattgtacatcttatatctcctttcaactttctataaatattataacttaaatttcgacctcttgaagttttttatttttttgtggtaatataattattagtgttttaaaggaggattttttatgaaacttgtacttgctgagaaaccatctgtggcaaaaactatagcatcatttttaggtgcaaagaccagacaagatggttactttgaaggaaatgattatataattacttatgcagttggacacttagtatcattatatgatatgaaggattatgataaagataaatactctggctcttggaaaatgaacaatttcccatttgttcctgaggataagtttaaatttaagattgatagttctaaaactaaacaattcaacactgtaaaaaagcttttgaatagaaaagatgtagaatatgtaataaatgccactgacaatgaccgagaaggagaacttatagcatttttaatatttttactggcaaaaaataaaaaaccagtaaaaagaatcttggtaaatgaatggacaccagaagatattacaagaggtataaaaaacctaaaagatgaatatgaaatgagaaatcttcaagctgctggatatactaggcttattactgactggttgattggaataaatttcacttctgttgctacattgaaatatggaaatgggaaactattaaacataggtagggtaattcttccaacagttaaattagtctatgatagagatatggaaatactaaactttgttcctaaaacttattatgaaatagaaggacattttaaagctgaagctggtgaatataaaggtaaatatgttaagggtaaagaaagtaaatttgatacacttgaagatgcaaataaaattatagcttcaattacatctgaaactggtaaaatactagataaaaaagttactatgtcaaaggaatatgcaccaaaactttttagtttgacatcacttcaaggatatataacttctaagtattccaattttacatctgataaggttttaaatgtctgtcaatctctctatgagggtaatggtaagggtggatacataacttaccctagaactgattccattttcttagaagaaagtttggcttcaaaagcttctcaaactttagataaattaaaggttggtcttgaatatgaaaataaaattaaattttctaaaactaaaagagtttttgattcttctaaagtagactcccatagtgctataattccaacttatataattccaaaaagtttatctaaggatgaacaattagtttatgatgccataaaagatagatttgtagcaaactttatgcctcctgctgaatatgagaatacagaaattaagactgaagtagataattgtactttcttaacaaaaggtaaagtgcttaaatcaaaaggataccttgaggtatataataaggaagaaaaaaacgatttacttccacttgtaaataaagatgatgttgtagatgtgttagaaataaaaccattaactaagcaaactactccacctaaaccatatactgaggacacccttttaaaggctatgaaaaattgtggtaaaaatgtgcctgaagaagatacaacagtgctatctggatattcgattggaacatcagccacacgtgctgatgtgttaaagaagataagtcaagtgggctatgtaaagaaaaaagggaaatcttattctataacagaccttgggaaaaatttagttgaaatttttcctgttaaagacttatttgatgtagattatactggaaaacttgaaaaaagtttaagcgatattcaaaaaggaaagtatacaagaaaagaatatcttactaatatcattagttttatatatcaaaatgtcaatattataaaacaagatgcttcaaaaaatataaacacagaagcatatactttcgattcaaaaactaaaaaatttactaaaacaaaagaaaaaaaacagaaaaaagatgtaactaatactgaaaaagaagttgctatatcaaaagattctaataacaaaaaagaagttaaaaatggtgatgaaaatcaatctcttggcaaatgccccatttgtcaaggtgatgtactagaatttgacaaaggctttgcttgtaaaaatcataaagaatgtaaatttgttatttggaaaaatgataagtatttaagtctttataaaaagaaagttaacaaaacaatggtcaaaaatattttaaaaaaaggtgaaactaaagtaaaatctttaactgctaaaaacggtaataaatttgatgctacattaaaatatgataaaaatccagataccggctatttcaattggaaaatagagtttgacaactaaatattcataagaaaagaaatagcagtagtataataatctatattatattactgctatttcttttcttatgaagttttaacttttttaatagtgacttttacaatcacactctaacctaatttctttactatttctgataactttaatgtatgttcatctaataaagttagttcctcttcagaaagattagataatttttttactagagattctttgagaatagcttttactgcatcaaataatttaaatgctttatctgttaattcaaccctaagaatccttctatcttttgggtcaggaaatttattgactaaaccatgttccactaatctgtcaataatcggagtcatatttgattttaaaattcctaaattagaagctatttgagaaattgatgatgaatttgatgtcataagataaagaattaccttagcatgtgatggagccattggacattcttcaaaataagctttcattatatcagagttattttgaaacttttttaacaaatcgctttctttaaatatattattttcaagcacaaataaaaaatctaaaaaagagtccgctattttaagtatattgttgttatccatatttgtaacatcccttcaatagataatataataaaacattgttgtttaatatagtataaattataaactattaataaatttaaaacaagaaaaagttattgactcataataattataaatttataatcaaattagagaattataaattgccaataaagggaagttttttaattagtctaaaactaaacttaaattataagacactttaaattctacaacaagctagtgtgcaatatataataggaggagatatgaaaagatatttaatagttttcttaatgtgtagttcactgtttttagttggatgtggaaaaacaaaagaatctgaacctgagaaaccaatagcagtttctgttcaaaaagcagtaggtggagaaattgaaaacacaaattctttctcaggaactacaaaagttaaagatgaaacagctgttactgcacagactgttggcacagttcaagaagtgtatgtaaaacttgggcaaaatgtaagaaaaggagatgaattattgagtataagcagtccagagctagaaaatagtgtaaagcaaagtaaagcctcactagatttagcaaaagcaagttattcaagtgccactggtggttcattagaggcacaagtaaatcaggcaaaaacagctcttgacaatgcaaagattcaatatgaggagtctcaaagaaattatgacaataataagattctttatgaacaggaagtcattagtttagaccaatttaaaaaaatagagttttctttagagcaaacaaaacaacagttagattctgctcaaagagcatacgatacagcaacttcaaaaagtatacctcaagctaaagcacttgctaaaaaacagcttgaccaagctcaagtatcatataatttagcaatgagtaatttagacaaattaacattaacatctccagtagatggtacaataacagctaaaaactttgattcaaaggaaatgataacacaatcacaaccagcttttattatttctaatcctaatatactagaagttgatttaaatgtagcagaatcagatataggtaaatttaagaaagatggaaatgtagatgttataattgaagaccaaaggattttaggaaaaatagattatgtaccttcagtagttgaccctcagacatctttatatcctgttaaagtacttgtaaataatgcaaacaacaaatttaaggcaggtatgtctgcacaagtaaacttaagtattgaaaaagaaaatggtgctgttacagtgcctaaaaaagcaatatttgaagaaaatggtaaaaaatatgtatacatagcaacaaaagacaatatagcaaagaaacacttggttcaaactggaattgtaacagaggataaaatagaaattaaaagtggtgtaagtgataaagatacagtgattattggaggaataagtcttatttctgacggaactaagatatttcctgtagaaaaggagaagtagactatgaatttaacacagacttccgttaaacgtcctctcacaatcataatggtctttttagtattaatagtttttggtggtattggatataaaaaaatgtcaataaatctaatgcctgatatagaaataccagttgtaatggtcatgactacttggacaggtgctggtcctcaagacgttgatgaacaagttagtcaaaaagttgatgaaagtttatctgccgtttcaaatgtaaaatctactatatcaagttcacaagaaagtgtttctatggtagttgctcagtttgaatttggaactaatttggatgaaataatgaatgatgttaggtctaaagttgatgcattacagaccagcctcccagatgatgcagcaaaaccaacagttttaaagctggatatgaatgcacaggctataggtcaacttgtcatatctggaggaaatgaaaatagttcacaagccttaagaaaatacgctgaagatgtaattcagcctaaaatagaatccatagatggtgttacttcagcagaccttaaaggtggagaaaaagcacaggttaatgtaatagctgacccagctgttctttcaaattatggagttagtttatccactataaaaggtgtcttatcctctagtaataaaacattcccttatggttcaattactcaaggtgaggataaaatagttttaagagcaattgataaattagaatccctagatgatataaaacagattcaaattcctgtaaaaggaggaaatacagttagattagataatctttgtagtgtagattatggatatgcagacaaagatagtatttatagatacaatggaaaagacagtttggtaatagatatttctaaacaacaagatgccaacactgtaaaagttatgcagagtgcatacaaatacgtagatgaattgaataaggaaaatcctcaatttaaaattaaaattgctaatgatacaagttcatacataagtgaatcaataaacagtgtaatgagcaacttgcttataagtgctgttatcgcatttattgtaatatttgctttcctaaaaagtgtaagagcttcactagttgttgcagttgcaataccaatttctataataggtgctatagcaattctctactttactggtgaaagtttaaatcttattactgcaagttcattggtaatttcagttggtatggttgttgataatgctacagttgtaattgaaaatatatttaaatataggaaaagtggcagattgagtcttgatgattgtgctattgagggaacaagaactgtaacaaatgcaatacttgcatcaacattgaccacgatagcaatattcttacctatcatgtttacagaaggtatagctaaaataacttttggggcattaggtaaaacactaatagcttcactagcattctcctttataggtgcaattacactcgttcctagtgtatttgcaaaattaagcagaggaaaaaatagtcaaaagatgcaagaaaaagatagtcctatatttgataaggtaagtgaagcatataaaaaattattaagtgtatgtttaagacatcaacgcttagttgtaatatcaagtttacttatttttgtagcttccttatttggaatgggatttataggtatggactttatgcctgcagcagacaagggtgaattatctatttctatagaacttccaaaaggtcttagcctagaatccaatgattactatgtatctatgactgagaaaaaagtctcagatattccagaaattaaaactttaataacaactttgacatcagattcaaataatagtaaagcaagtatagcaattgaattagaatctcaaaaaaatagaaaaagaactactgatgaaatagaaaaagagataattgatagagtggctactgtaccagattgtaaaataaatgtaagtcaaaacagtagtgttatgggtggagctggaggagcagacttcacattagaaatgaaaggtcctgatttagatgtattaaaaatactgggaaaagaagctgaaaaagaatttagctctataaaaggatttagaaatgttgaaacttctcttacagatacaacacaagaagctcaatttactatagataaacataaggctcaagaatatggtgtaaatactgctgaaattgcaggcatgttacgtacagcaataaatggtgactccgtaaccactgctactattgatgattacaaagtggatgtaaacctaaaatttaaagcagatactattgatagcttagaagatataaagcaactaaaagtaaactctgcaactggaaaagaagttcctcttggtgctttttcagatataaaaatggcagatggtctacaatctatatctaggactgatggagatttttctgtaaatataactgctacacttgacaatttagatgctggtactgctacaaaactagcactagaaaaaacgaataaaatggtaattcctaaagattactctataggtgttggtggtgaaacagaaatgatgaatgaatctatggcaagtcttggattttcaatggtcatagctatagcattagtttatatggtaatggtagctcagtttgaatcatttagtaaaccatttataatcatgttctgtgttccatttgcattcgttggagttgtgctttcgcttctagttagtggtcaaagtttaagtactgtcggtatgctaggtataatcttacttatcggtattgttgttaataatggtatagttcttattgactacatagagcaacttagaaaaacaaatcgtaacaatgatttaattggtttggtttcaattggttgtgcagcaagattaagaccagtcttaatgactacagcaacaacaattttaggtatgttgccaacagcactatctcttggtgaaggtggagaaactatgcaaccactagccatagttataatgggtggtctaactgtatctacacttataactttggtgcttatacctactatatacttaatatttgataaatgggaaaataagttttcagacaaaatgcctaaaatatttggtaagataacagataaaataggaagtataaaacgtaaaataataaagaaaccaaaattgaaagctaaagtttaaatagaatggagggtgattgtattgaataaaaaaatgagcaaaatagttgcaattggctgtggtgttggtataataactgccaatttaatcccagtttacgcagataataatacttcttctataaacaacgttgataattctattttaagtgactcaaataaaagaacatctgaaaaggaaattttgactgctagagaagctgttagtgctgcacttaaaaatagtgaaaaattaaaaatgaaatcagaagaaataaaaatgttaaaagaaaagttagaagtacaagatgagtttgatagttttactggaagtgacaactcgtttccatacgaccaaattggacttcttaaaaatcaaagtgaacaggctaaaggctttatggaggaccaaatagcaaatgatattactaataaatttaacgatttagtttcaagagaaaatgagctagataagataaaaaacaatcttgaaataaaaactaaagaaattaaagatatgaaattaaaaaaagatttagggttagtaacatctttagaaactgaatcagctgaacttgaacttcaaacactacaaaatactcaaaaagctaaacttcaagaactaaaaaacaatcaagactattttaagttattgactaatatagatttaaataattatcaattggataaagaatatagatttgaatcttttagagtaggtggctcagttgattcatatatggaaggtaaggttaatgaatatttaaaatacgaccaattgattttagaacgtacagaagaaagctttaatgataaagatgagaacaaagcagatttaccagatagacctaatcttacaagaccagttgctcctacaaaaccagagcaaggtaacctaactgatgatgaatacaaggttcttatggataagtatgaaaaagactacaagagatatgaaaaagaagttgaagcatacaatcttgaaagacagacttatgctgctggccttactacttatgcaaattatcttcaacaaaaatttaataccgaaaatggtctagtaacattagaagacagtaaaaaagctcttaaaaaagggttaattgatagctatgctcaattacttgctttagaagatacaattcagattactaaaaaacaacttgatttatcagaaaaacaattaaaaaatactaaattaagatatgatttaggattaattactctaactgattataaaaaacaagtggtaagtaatcaagatgctaaaaatagctatgacactcttattgtgaattataactcactaaaaaatggtatagaaaaaccttggatacttaatactggaaaataattctggtaaatagaaagattactttaacatacgtttgattaaaaaatagttatgcacactcgtggctttagtcatggaagattcagaaggcaaataatagaaatagattagtaaaaatatatttacttataaaactgtatacttttatagaggctatctcaaaattggatatgtccctgtcaagtagacagacttaaaaaaggctatctttatgcggaatgagttcgatattcaatcgaactcattccgttttttaattgtattctttcattattataaaaataaatataatcatttattagactaatcatttcctttggatctgtagtatcaattaaatatattaattcagatttaaaatgactgaaaaaactttctataggagcattatcccagcagttgccccttcgggacatagattgtataataccattatctttaagccttttagagtaagatctacttgtatattgtgaaccttgatctgtatgtaaaatacaatctttagctaaattcatatttattagttgatttactgttttattaactaatttagtatccatttttgtacttatctcatatgccactatttcaccattaaataaatctttggctacattcatgtataagaattttttaccgataggtatgtatgttatatccatacaaattttttctaatggttgattagctctaaattcacgatttaatatattatcatatacctcatatgatttaaacttacgtctatatactttctttctaataatagatttaattcctagttctttcatcaacctatatactttcttatgattaatagggctatcaagtattttatttaaataagtacaaattctttttctaccgtaagttcctctatattttttatgtatttcaattatataatccttaataattctatctttgatacccctatcggaagattttttagaataacttagccatttatagtaaccgcttcttgacacacctatcaacttacacatactagaaatactatacttcctagacataagtttaattgttttaaatttatcgcttactttgacttgtccaatagggtacttaacttttttaaaaattcattctccatgcgtaagtacttcaattcttcttcaacagatttaaattttctattatcattttctagactaatatttttaaatctgcctctagtttcctcattaaatgcagttttacctttatttttataatcttttacccagttttgaacttgtgttttgcttcttatattcagcatctcagcaattttgtatgatgagtatccttcttttatatataaatttacagcttttagtttaagttctttgctatattttttatgttttttagacatagaaaaacccccttagagtatacgctttttagacttattataatagccttttatttaaatgtctactataaggggattatactaaaatagagataagcctcttttttattgtttaaattataaaaatatatttgattccatacaaaaagagtgccttctgaactaaaaagttcattttgagacaccctcaaaagcttaactctaaatttaattattttttatcaaatgtctcatctattttacatcttaccatgttaacaaattcagaaatattatatcctctaagtttgcatccacatttaggacaataatccagtttcctagataccaaagccctacaactaggttctggacatcttatttttagactctcatctgctactttaaatccacatcgtgggcatatactacctggacgtgatgatacttcctttccacatttaggacactttgtcaactttatcccctccagtaaactcaatttaattgatagttgaaatttctctctacaataatatatgcaatataattaaatacgtttcacttacaactgtataagttaaatttttataataaaaatcccctatattcaatttacaaatacttaatttgatacattgaacaataggggattttatttttatttagttacatattttgcagtctattattatctaggattttttatagatgcttgagctgctgcaagtctagcaattggcactctaaatggtgaacaagatacatagttaagtcctacactataacagaactctactgaagatggttctcctccatgctctccacatattcctagttttaattctggtttaacttctctacctaatttagctcccatcttaactaacttaccaacaccattttggtctagtacttggaatgggtctttttctaatatttcttcatctacatattgacctaagaatttaccagcatcatctcttgaatatccaaatgccatttgagttaagtcattagtaccaaaactgaagaagtctgcttcttgtgctatttcatcagcagttaaacaagctctaggtatttctatcatagtacctacagtataaggaacttctataccttcttcttttattatagcgtcaacagtttctactatcatttttcttattatttttaactcatttacttctccaactaatggaaccattatctctggagaaactttaacacctgctttgattgcttctatagcaccttgtattatagctttagattgcattacacatatttcaggataagttattgcaagtctacaacctctgtgtccaagcattgggttaaactcatctaaatcaactattctcttcttaatatcacttacttttattcccatagattttgaaagttcttctatagtctcatcatcatgaggcaaaaattcatgtagtggtgggtctagtaatcttatattaactggttttccatccataactttaaataactctacaaaatcttctctttgcattggtaatattttttcaagagctttttctctttgttctactgtattagataatatcatttctctaactgctggcaatctagcttcatcaaagaacatatgctcagttctacatagacctataccttctgcaccaaactctatagctgcacgagcatctctaggattatctgcattagttctaaccatcatacatttgtgtttgtctacccagttcattaatttttcaaagtttccagttaaagatacttctgttttcttaacatctcctaggtacacatttcctgtagaaccatctatagaaatgtattcaccttcttttataactacatcatcaagtgctcttatttctttattaaactcatcaacttttatttctccacatccagcaacacaacatttacccatacctctagcaacaactgctgcatgtgatgtcattccacctctagctgtaaggattccttctgctttaaccattccttctatatcttctggagatgtctctaatctaactaaaactactttttctcctttttcatttgcttttactacatcatcagcattgaaataaactttaccacttgctgcacctggtgatgctggtaaaccttttgctataaccttggcttcttttaatgccttatcttcaaattttggatgtaataattggtctaattgattaggctcaattctcatgatagcttctttttcatcaattattccagcttcaactaaatcaaccgctacatttattgctgctgctgctgttctcttaccatttctagtttgtagtatatataatctttcattttctatagtaaactctatatcttgcatatctttataatgaccttcaagtatatgagtaatttttacaaattcatcgaatacagctggcattacatctgcaagagttgatatattttgaggagttcttatacctgcaacaacgtcttcaccttgtgcattcattaaaaattcaccaaataatttattttctcctgtagctggatttctagtaaatgcaacacctgtaccactagtttctcccatattaccaaataccattgattgaatatttactgctgttcctaagttatgagctatatcattcaatttacggtatacgattgcacgaggattattccatgatctaaatacagcctctattgcaagcattaattgctcttttgggtcttgtgggaaatcattttttatttcttttttataaattgctttaaattcttttactatttcttttaaatcatcagttgtaagttctgtatcaactgtgtatccctttgcttcttttactctgtctaatacattttcaaatttatattttggaacttccatagcaacatcagaaaacatttgtatgaatcttctgtaactatcatatgcaaatctttcattttgtgtagcctctgctaagccaacaacactattgtcattaagacctaggttaagaattgtatccatcattcctggcatagagaatactgcaccagaacgaactgatactaataatggattcttattgcatcctaatgttttatttaagtctttttctaaagtagctaaatgctcttctatttcttttattatctctgctcttatactttcattgttaacataataatcattacatgcttctgttgttatagtgaatccaggagggacaggtaagcctatcttagtcatttctgctaaattggcacctttacctcctagtaaagatttcatgtctttgcttccttcaccaaaactataaacatacttagtttccattgttaaatcccccattaatctttttattttaatttatatcatttttattaatagacattattaaatttctatttctttgtatatctttagaccattttctttcattatgtctaaaattatacctgctgtttcttctattgccttatttgaaacgtttattactgggcatccaattcttttcattatctcttctgaataatctaactcctgaagtattctttctaaattagcgtagtttgctttactggacaatcctaaagcttttaatctttgggttcttatctcattcagcttttcaggtgaattagtaagacctattatctttttagtatctatctcaaacacttctttaggaattggtatttctggaactaatggaacattagctacttttatatttttattagctaaatacatactcaaaggagttttagatgttcttgatattcccactaaaattatgtctgcttgaagaacacctctagggtcttttccatcatcatatttcactgcaaattctatagcttcaactctcttaaagtaagattcatctaattttctaattataccagcttctcttttaggttttcttcctgttctcttgcttatttctcttagtatatctgtcattaaatctatacaactaagaccttctctttcgcaatatctttcaacaatactgcataattcttcatcaactaatgtatatacaattaaagcgttttcagcttttgcattctccaaagtttcaagtagtactcctttattaatcatgtatggaaatctttttatttcataagtttcattcacataaaactgagacatacatgcctttgcaacttgttgtgcagtctcccctactgaatctgatactgcatatataattaggtttttcaccagcatacctccttaattgtcaactatttctaagaatagcttagttatgttggtttttgatattctcccaacaactctcatatgatttttgtcttctcccttatattcaacaatcggaatcgaatctacttcatgttctattatttttcttgaagctaataaaacacttgctcctttagttaaagtgactacatttggagttcttgtcattatcatacctattggcattttatttatatcagaacctcctatagttgcttttagcaagtcttttctggaaacaactccacataactcttcattctcatctataataactatactccctacatcagataaaaacatagtgactattacatcatatatactttcatccttcttagctagtacaggcatgctcattatatcctctactgttttttcttttacacttttaccaattaaatttatttcactaactcctgaataaaaatatccaacttttggtcttgcgtctaatattcctgtcattgttaatatagctaaatcagatctaagtgtagcacgagtcacattcaagctggaggcaatactttcactcgttattggttcattttccttaactatatctataatttttagttgtctttcattaagctgaataataatcaccttctttcattgtgctatactttttatcttttcgcatcttatatagtatattatataactatatataccattctgtaaacagattttttattgaatacgatatattttttactaagttctctcgcttaaagatatttattatatattaatgggggatatttctttaattaatagaactatattagtattacagttaatattataatacataattggtcattttaattcattttatattaaaatttttaataatattgtttcaatgtgaatataaaattgcagaactaattcaaaataatttttacgactacaaataacctataatatacttttaaagaaagtatcctaacaagaatatataaaaatttaaaagggttgatttaaaaataaccatcaaccctttttactaatatctatttatattaccatcaaatcttacccaaatattttttcttgcaattgtcttaaatgatataaagtagtatctttttctatctctaccatatcgtaagttataacttcaccttttttaatatcttttacaactttagtctttttacttatcaaaccaataggtacagcattcatagcctttgctacatcgtatttttctatagtaccatagcatgtatatgctccataaccatccataaactcaccttttttcaaatctttcttagctatagtcataacttctgctactagtccagctttaggtactattgtagccttatggtctaagactgccatagctgctgataaaggagtctctaaactacataaatgatatggtctatataatatgtaattaggtccatcacccatacttaaatattttagttcatcattaactgcttttaatttatgggctactactacgaaaactccaggtgctataccatttacaaaatcaactacaccataattatctaatactccaccttcgctttttaatgcatatttcttaggtacttcattaactgtagcttcaataccatgaccacctcttacatcaggcacaaatccagttgcattacacattaaagccatttctaccattgttttagttccttctttaaaagaagctatcatatgaggtgaagctccttttctttctgcttcttctctaactgtatcaggattacaatctaaatctaatttattatttttacctttacctatcactctaacttcaaaccccattgcatctgcaaaatcaaataattccattactgcacctggctcatctcctgcagaacctgtaaatatcactccagcatcatctgctaattttttaagtattggtccaacaacacaatcagtttcagcatttaacataactatatgttttttatttaaaatagagtttaatgctatctctgcaccaattgcaatacccccagttgcatctataactacatctattgacttagttttacaagccacaagaaagtcattacatgtcaatacttttccttcttgtaattttatttctgcatccttttcatttgttacattatctataatttcttcatctattcctgcatcagtaaaagctttatgagccaactccaaatttatatctacaacaatagaagcttcaatacctttcatatttgccatttggcttaccattccatttcccatatgcccagctcctataagagctacttttatttttttaccttcctcttccaattttgcaagttttctgtttaaatctaacataccaattcctcctgttataataattttattttcaaattaagaaatagttattaaatctccaatagttatatctggatttcctatttccacatgtatttctcctggtaaatttacttcacattttccatcaaatttgattgtacaatgcccaatttctctaagagtcttctgagcaatatcaccaactgaaactatacaataatctctattccctatagtaagtgtatctcctatttcaacatcactttttaatgttgctatcgaatgaattacagatatatcctttaagtcgtcatcattaatggtttcatcatatataataagacaattgctttcatccattaactctttaactaaactgcctatcccacttatcttaacttcatatttcatgacattcctcctgataatttatatttatattgagttaattaaaagaaacatttattttttcttttataaattttatagcttgtacaatactctcttcatctttaaatttttgctctgcactatatatatctaatccttctatttcttcaatctctttaaatttagccattactgtacgcccttttaaaatttctccaaactttataaacccatctgaatctgaagatataatggctatacttcctttagaaaaatagcttttctttttgcctgtagacactatatcacccttttttttagctctatttaaagttttaaaatacaatttattctgcttcattataaatatagtatttaaaatataagcaacaaataaaattactaataatttcatatttatacaccttccaaaaatcacattatttttaaatctgtataacaactataaatgctgtacaatagttatataaggtttttaagtaacacctttttaaattctaaaaaagttctacatttacttatcttattcgttaattttacatcttggcctatctttaaaacttcttcataaatttttactaataagtctgagtctatcttattctcacatggaaacattgtcataagaattatttttatacttctatttgcatattctattggttcttctaaaattccaactgccattaaaaacttatctgatttttcatttacagagtgaggaaataataaacctttatcaaatactgtgggagatttttcttctctattgactatattttttctaaacttatcatcaatacatcccaaatccataagatggtccatcattttttctaatgaagcaagtatagtcttttcatttaatatcataaatttatcttcatctaacaaattatttattagtaaatttgtagaattagtagtgtcaatattcccttctcttaggcacaatactgtttttaattgttctcttaatttgttttcatcaaatattgtatttatttttaatactattgtatttatattcgatgtgtctaaatcaatagttgtaaaaactatatcgtattcatctaagttaatatttctcaaattaaaacttgaaagagtatcaattttaggattatttcctatcagtttttctactcttattttcaatagttttgctgttcctagacctgtactacatataattgctattttttttattgaatagaatctactgctatttctttctaaatatccactgaaatggattgctatatatccaatctcatcttctgaaacttctaagttatactttttctctattacttttcctgctatttgtgctaatttaaatggaagtatataattttgcttaatctcttctaacaaaacattttttaactttatattaaataatagcctgtttaaagtaaaactaagatgatatcctagacctactcttaattcatcctcatttataaaaatacccatatcgacatatatttgattaaatatattttccatcaactcatcaatgtttttactaattctactactatttaaagcacattctgatgctggtgcatttccactaactaatggtatagttaaataaataatttcttcatcatttaaagtacattcaaacattcctgatattatatgttttatttccctagcaataaagtattcatcatatgatttaagtaaatcaaactttacatcatagtcttttactttcttttcttcttttactctatagactaaaactactatgtagttaataacttctcttaacatttcatctgtaacataaaaattattttctttaaataaagtcaatagtttttcttctaaatttatgatttcttcttttttgattcctttaaaatactttgaattactgaaatctttccttgagtttttatacaactgatttaatataaacagtctaatatcaagttcatttccatttaatttcatacctgtattctgttttttaatcaagtttaaattatatgaagccaaaactttttctacatactggaaatcatttactaaagtagttcttcctacacacatctcatcagctaaactatcaagtgtaataaatccatctagttctatcaagtaatttagtataaactctactctatcttcttttgaatttaatgaaaatacattttttctattcatatcaataatcttattgagtatctgctcatcttttatttctagtttatagccttgaccctttatatatttgattactgctatatcattacctaaatctttattcaattgttttatatacgtccttacacttctagttgtgacattcaattcatttgctattgaattaatactcacaaactcttttttactacacataatcaatatcttaaatatcttgcggtcaatagaaggaattttctcagttacactcattttgtatctcctccttgatttcattctagtacaaatttgaaaccaaattaatacataaaatttcactttaataaaggaaaatttagtattaatctaactcgataattacagctaattaatagtataaaagctagtctttcattaacaaaaaatcttgactagcttaaatttatatttacaattttattaattaattccaagccttatattgacattaaatattatctcaatgcaaatactgcaactccatatgcaataataacagctattggaccagttattaaacgagagtaaaataaagctggaacaccatactctacagtttctggttctgcttctcccaaacttaatcctactggtacaaaatcacatccagcttgcccatttattgcaaataaagctggaagtgctaaatatgctggtattgcaccaagaccaatttgtgtacctacaagagtccctactacttgagctataactgcaccaggtcctagtattggtgataagaatggaagtgtgcaaattactgatataatcaataatccaccaatattacctgcaagtggagatataactcttgcaatccagtctcccagtccagatgctaaaataattcccataagcatacttacaaatgccataaatggtattacgttattcattaccatttggatagtgtctcgacctgcatcataaaattttgatactacttgccctgccccttgaccaatagaaagtattatgttctttttagcatattcaccttgtgcttttgacttaacctcatcataattatcaggctttctaatagaactcttattttcgcttttattttcttgagatttttgtggcatatcttccccatctacaacacttatacagttaggattaacatctgatacataatattcttctgttataaattttgctaaaggacctgtttttccaactggatttacatttattgtaggtatttttttctttggataaactccacatctagcagttccaccacaatcaataataactactgctacttcttcatcagaaactccagttttaaatccatctacaatttcacaacccagtagttcttttatttttaatgttacttcatggataccaccagcagtcattgatagtatcttatttctattcccttctttttttatatacaaaggacctccccagcctgaagttcccttttctatttttaatattttattctcctccattttatctacctcctaagccttatttgttgctctattttttcttgttagaaaagcatacattttttctgttactatacctcttataaaaattacaattagaccaactataaaataccacaatgccagtgtagtagtttctttacctaaagtagtcaaacctgctgatattcccaaccatacaaaaagttctcctgcatttgcatgtggaaaaagacctgtaattggatgtacaaatgaaactgctgcatcataaaatcctgctttgtgctcttcttttaaaaatctaccaaatgtatagcacataggatttcccaagaaaaatactgatactaatggaagtagaatatatcttgtaaaagagttctttcctagcttagaagcccaattattaactctttcctcaccaattatcttaatcaaagagttaatagctaccattaatacaattagcgttggaagagtacctgaaacaagacctataaattgttctccccctttctgaaacaaaccgataaaccactctgcacctttacttagacctgtaataacgttttccataaaattataacctccctataatatctttaaatttttaattttactgcttaacataaattttacaaattacatcttttttctgtactatatgctaatattgtaaatgtttttttattaatatcattttaatataatatttttgataaataaatacatcttttttcaattttataaaggaaaaaattgtactaattagaattttcagaaatatacaattcttatttcgactatattctaaattcttcttagaaatttaagaacttatttttatttcttttattattaaaattatctaaatctgataaaaataaaaaatagatgctcttttacgaacatctatttcttaatcaaattatcttttagttttcttatagattattttataggtatataaatatcaatttgtgagttcacattactaggacctaaaaatcgttcatcatatacttcaaaatcatctcttatatccagttcttcttttgaacttaaaaaccaagtaccccatatatattcataagttttgtctaagttatctaagctaccagtatgagtaaatatagcatactttccttccttaatagtttttgaaacaaatgaatttggaatcacatcataactattaacttcaagtcctattatctcattaaattccatactttcactaactaggtgtatttcagagattgcttcacagattccaaaaactctctttgatggcaaagtatttgggacaatatgatgtacttttctgaatttctcccacaagtcaggtaatgaattattttctaaaattactttatcctttatacctattacctttattttttctatttcttttataactggtttaatcgttatatttccaacaagatgtctcataaaatctaactctaattttttctttttaccaacaaatacatcaattctattttttctatattctatagggctaaccttgtatatagatttaaatgctctgctaaatgcttccgaagattcaaatccactaccaatagctatatctatcacttttttatcactatataaaagttcttttgtactacttactaatcgtcttttttttatataacttcctacactctcaccaaacatagacttaaataagcgtgttaaatgataataagaatatccagtttcttttgccacatcatttacagttatattttcatgtaaattattctcaatatacattacagctttttcaaaatactttaagtaatccaatatggcacctctcttctacttaaactctttaaatatgtaaaatagcactattttttactatactaaaatattataactaattcaatacgataaataaaaacttttagttgatttatatagcctaattatttagaataattaaatacattttttattcaatgaaatcaaaaaagtcagatggtgctttttcaatatttatgtttatcctctgtgttatagatttaatgtcattttttaaatagtagctctcccatttattctctagtccaccccataaaatattaaactttcctatatttaaatccataactatactttttaaagttccaaaaaaatcattatagtaattacaagataagccatttggatactttaaagacaataaattcattaactctttctctccaatttttttagccttatttatatattctttaattaatttatatctatgaatagaatttttcattgattgtggttctaatttatgaagtttatcaatatgtgtatgattagtagagtgtaaaaaatattctctcttactttctaaactgttgattatatttacttcttttttcccatctaaagtctccacaagtgcaatgtttccagacttatctgcaagcaataaattaatattgtatgcaattggcatatcttttaaatattctaatgcttcatctacatctttgcaattttctaacaaatatctaataacagcccaaaactgtaaacctacaattgctggttttctcaaaccatctgaattgcctacaggaataccacatgatgactgacttacacctaatccacattcattcataccttcacctcttccaaattgcataacggtagtacctatatgtgcatattttccatttactttagttttacataaaacaaaatcctccatattgtgtgagaaatcgaaattacgtgcaaatagtacatgcccattttcagttaattctggtgttaatgcaacttgactacaacctggtttaagataagtcatagtataatataaaatttgattacaattcacttgaattgcatcagcaaaaccttgcaattcttcattaagacctggacaatatttatcaaacaactctatcatctctttttcttcttttttgcttaccagattagatttattaatctgaccttctattatctctggcatattagcaaccaattctcctagtctgtatcctatctcataatttgtaccactcaattcaatatttcttacttctaaagtttccatatgtacccctcctatatatcttataatcgattttatcattcgaattgtaatcattcatgatattttgtgctacaagttaaaaaaggttatataaaaacagataagcctctttttcattgttaaaataataaaaatatatttaatttcatgcaaaaaagagtgtctcataaactaaaaagttcattttgagacactcttcttattttaaagagtataattaaaaatagtctaagttctactcttccttcatttttttcaataactctggattttcaaataaattaaatcctgttaaagctaatatttttataccatcaattactctatcttttgcatatgaatttatagaagcctccaaaaattcttttgtatgtagttcttctccattttcagaaaacttcatcaaaggatgtatacatggcattatttgacttaaatttcccatatctgttgaacctaacattacttgttcatcttcatatattccaaattcctccataatctttgtaaatatgtctaccaaaactttattttcatttaatccttggcaagttggttcaaagtgataaaattcaagttcacatccagtggctattgcagcacctctagcacaatttttcactttttctactacttcatcaaagtaattttgttcttttgcccttatctctaatcttacttttcccatatcaggtattacatttgcagcagttcctgcttctagtataataccatgtattctcgttccatctactaattgttgtcttagtgcatttatattattatatagtagtactactgcatctaaagcatttattccgttatatggcttagctcctgcatgagatgcttttccagtaaatatgaaatctagacctcctattgctataatttcaggtgttacacaagtttttgaatttggatgtatcatcattgctgcatcatagccatcaaatacaccatgttctatcaagtaaggctttccatctccagtttcttcagcaggtgttccaattatacttacttctcccttgtaagtatccagtatacttgaaagagctattccagctccaactcccatagatgcaattaaatgatgtccacatgcatgtccattgcctggaagagcatcatattctgctataaatgctattttaggaccatctccatttttcttggttgctttaaaagctgtagccatacctgccaagttttcctcaacatcaaaaccctcttctcttagaaattctgatatttttttagcagatttatattcttgcaaagcaatttctggttcatcatataaagattgacatagccctagaattttttctttctttgaatcagccacttgtattattctttctttcataccaatcttacctcccactaaatttatttagtaatttttatattttattataactttaatttaactcatgcttatcctcttttaagtatctattttcccaaaactcagcatttcttatatctaattctataggattaaaagttctatcgctcctttttactcccatctttttctgcctttgataatcgtaatatgcttttatagctggtttttttagtgtaaatataccaactaagtttatatatgttaatacacctatacatatatcaccaagtgcccaacttgtaagtggttctataaagcaacacattgctgcacatattataagcataaatctacagacattaattatgtgcttttcatgtttttctgccttaattctagtcactaagtaagatacgttggtctccatcatgtatgagaaggctaataatgttgtaaatgtaaatagtagtaaaactattgctataaaaatatcacctaattgaggatgtaatgtatttattgcactctgtacatattgtggacctggttctacacctggtaatgttgtgtaaacatctgtaacattatacattcctgttattataatcataatacctgtagccatacatattaatagtgtgtctacataaacagaaaaagcttggactaatccttgtttggctgggtgactcacttctgctgctgctgcaccataagttccagaaccttctcccgcttcatttgagtatatacctctttttactccccaagatattgctgaacctaacatccctccaaaaaccgaaccaaatccaaatgcagatttaaacattgtcataatagctcctggaactagatttatatttgctatgattattaccaatgtcataataaggtatgctccacccattataggtactactttctcagcaaataaaccaattcttttaattcctccaaaaattattatacctagtgcaatagaagatgtaactgctattgtcatttttgaaaatccaaatgcttgattcattgctagatatagagtatttgattgtgtgccaggcataaaaaatgtataacttatgattgcaaccactgaaaataaaattgaacattttttccaaccaagacctttttcaaagtaatatggaggacctcccctgtactgtccatcatgctcatctttatatatctgagctaaagtagattctacaaatgcagttgccgaccctaatgtagccattatgcacatccacactaatgctcctggccctcccattgctatcgctacagctacaccagctatatttccagttcctatccttcctgccatagatgtagcaaaaccttggaacgaagatattccaacatgagagctatctccttcaagcaaaagagtaaacatttcttttacatcttttatttgaaaaaatcttaatttcattgaaaaatataatcctatacacaaacacattgcaactaatacaggtgaccaaacaattccattaatggtgttaactaaatcggtcacttaactcaccaccattcattttatatttatagacaataatttaaatagctatgtttcaacattctatataatcttcaactcaatatatctaaaaaatctatcttctatttatattatttttaatccacaagctataagtatctatctctaaaacaaagaatattaatcgatatataaacgtaaatttataaactttttaacgatatgtatttgacaaataatcaaacaatataaattggaatacatgtaatgaaaagcctgaaactgttactatataaatagtaccatatacaattattaatatataattgaatagtatatagttagattttaaattttcgtatttattatgaggtgtaaaattgagtacaattaccacctatttttgaaattcttttaatttaaattaaataggtttatgtaaatatataaatagatgataattgctactcaattccagacctttaggggtaactttatactaaaacctagaaaacttgataacattttggtgtgttgcactttaaattttaagtattgctataaaacttaataatttggtatttttacaatatttatgcttctaacttactttctcttttcttcttaacttttaatatatataaacaagatagtataccaattattagaattgctatctggaatataaatgtatatgtgtaacctttattgccataagtatctatccagtgtcctattaatgcaaattggaatacatctggtgaaaatcctaaagctgcagctatacctatagtagttgctgaatatttaactggaacttttacttcatcttgaactgcatagtatataccttttcccatgtaacctaatatacctactacaaatgttaaagctataaagatagtcattggagtagatgcaggtagtactaggaataaaattattactgctataccaaatacatatattggtagtagtacttttgtaggtgattttactttatctgcacaatatcctccaaatggtgctccaaacaattttagaccatgttgtcttattattgctaatgccccagacaatgccacagaacctccaagtactgatgttatatatggtgtaaaataagacattgtaactgtgaatgaatatacacagaatatgcttattcctactagccaagtgtttggtgattttagtactgtcataaaatcgccagcagacattttttcacttgcttcttcttctttgtcttctctgatatctacatctttaattacaaaccataatactggacacatcactattgataatattcctaaagatatcattacccatctcatacccaatacaggagttgaaaagcatgtataaatatataagaatattgctcccattactacgccagaaactccaaccatagcttcattgaatccataaactttaccttgattatcttttcctataactctaagtatttttaccatagaaggatagttcataactaatgatgtgattgcacaacctacccaagtagcaactgcaaatggatagttcatattaaatgcaaataaaaatgatactactccattaagaaatacagaacctaaaattatctttctataatcaaatctatctgctaaccagcctcctataggagctccaaatatattacctaacccataaattgtaagtagaaaacctagttgagtgtttgtacattctaatgcttttaggattggatcatataatgtatattggataaatggtataatataaactaattcccaagatattgctataataacaagttgaaacattaactttccaaactttataccgttttctttttctcccatatttaaaccctcactttttatatttattcacaagcataattgagttctttttttataacttctgcaagtatctcaacacctttaacgatttgttcttctgacattgttgtatagttaagtctcatagtattttttggaccattatttgcaaagaaggactctccagaaacataagcaactccagcatcaatggctttatccaataaatcatctacatttatactttcaggaagttcaacccatataaacattcctccatctggttctgtatatttagcttcctctgggaaatgtttcttcatagcatctaacattagcagacatcttttcttatactctgctcttattttttctatatgttcatttaagttgtatttctttaaaaattctattacttgtacttgcgaaaattgatttgactgtaaatctataccttgttttaaaagttctgccttatctatgatgtctacattaccacacatccaagcaactctaaaccctggacataatacttttgaaaatgaacctaagtataatactttatctttagtatcaagagatttaagtgtaggtagaggctctggtgtaaatcttatttctccataaggattatcttctattactatgacatcatacttattcacgacttccataaaatcttttcttctttgtaaagaccatgtttttcctgtaggattttgaaatgttggtattacatagattacctttatgttagaattttcagataataatttatctaaatcatctgttaccattccttcatcatcagtatctactcctaaaaaatcacattcataaggtctaaatgcatttattgcacctaagtaacttggattttctgtaactactatatctcctttttctagtaaaatcatagcacttaatgctatcccttgttgtgacccagtagttattataatattttctgcttttgtatcaatattttcttcttctttcattctttttactaatagatctaacaactcatcttcacctttagtaggtccatatgctagggcaaattttcccctttcattaagtactttttgagttatttcacttatctcttctattggaaataaatttgggtcaggaagccctgcagcaaaagatataacagttccaccacttgccaccttctgagctattttcttttgagaagctcttatagctgaagcttttaccatatccattctttttgcatatttcataatactttctcctccttaataataatttcttattgtgatgctaggcacgctaatgctattgaatttatttttatttcagctgtgtcagaacgtgaacctaaaattatcggatttgttgctcctaaaactatacctgcccacttagctttattaaatctaagccatgactttcctaatatattccctgcttctatatttggaaatactaataaatcaacatcaccagcaatattacttttaatacctttatgttctgctgcatgtgcatcaaatgctacatcaaatgctattggaccttccactatacactttggtatttctcccgatttttccatctctacaagtaggttggcatccactgtagattgtatcttagggtctaccatttcatttgcagtaagtatcgcagttttaggattttccatgcctatacttttcatagtaagaagtgcatttgtcattatatcttttttttgatttaagtttggcgatacatttattccactatcagtacaataaagaagtttatgatattgaggtaattcatatactgcaagcaaacttaataatcttcctgttctaagacccgtttctttatttaatatagctctcatatagacacttgtatttactaatcccttcataagaactttagcttccttatttttaactatctctacagcttttttaactgattcatcgggattttgacaacctattatttcatgaccttttaatccaatttctcttgatatactttctattttatccttgtctcctacaagaattggctttataatgtttaaatctgttgctgatttcacagcctttaatacttctttgtcttctgcaacagcaacacttacaataacaggttcaagctttttagcctcttctaataaattattaaaatcttttaacatactctttctcctaaatattaataagtttttgctatttcttctccattaagtactctaagtgctcctagagcaagtgcctccatttccatctctcctggtactatctctattggagctagatatgaaactttttctgctactcctttgactaccatttctgagtgagatatccctcctgtcaagataactctatctacattccctgaaagtgaagctccatacatagaaatttcttttgctacttgataaataaatgcatccattataagttttgccttttcatcaccctccttgattctgttttcaatttctatcatgtcctttgttcctaaataatcgtacattcccccaatcgaacttacttttgcgaccatttcatcatgagtatattttccggagtaacacaattctataagaggatatgcaagtaatccaccactcctttctggagaaaatggaccatcagacctaccaccacttccatcaatcattttgccttgtttatgtgctacaatcgatattcctgaacctaaatgagctacaataaagttataatcctcgtattttccccctagtttttgtgcaatttttcttgaaacagctttatggtttaatgcatgtaaccaacttgctttttctatgtctgatattcctgtaatcctcgatacatcatcaaattcatctacagaaactgggtctactacaaatgattgtactcctatttcatcagctatagttttagctaataatgcacctaaatttgatgcatgttccccatttatttcatttctcatatcctcaatcatttcttcactcacagtataggtaccaccttttatagccttcataagtccaccacgaccaactactgcgtcaaaagaatttatactatgattctcactacttaaaatatctactatcagttgttttctataatcatattcatcaaatactttagaaaaattttttaaatcttctcttgtatgggttatattttttttcaaaatttcattttcatcttggaaaacagaaatttttgtggatgtaccaccaggatttattactaaaactttcaatttaacaccccctagttctactatacagaacgtcgttcttgtattccggcctaaagacttcgtcctattgtccagaacgacgttctatattttattaattaaatactaacatataaaaataagtatttcaataattattttaaatatttaaaatattcattcgtagtcgtatcctgcttcaaatgcttctacatttttagaattgaatttacctttgccttgattttcaaagtattcacacataccactttcaaattcttcttttgtaaataaatccaaactctttaccatagcacctaacatgcaaatgttagcagctttttcattgcctaaattttgtgctatttcagtaacaggtacttttataacattaatgtcttctctgtactttctatccttacttactagtgattcattgacaaacatataaccattttttttcattaaactttcatacttatctactgatacgctgttcattcccaatagtatatctggattttttacacaaggatttgcaattttttcatcacttacaacaacattgcaatttgcacttcctcccctcatctcatttccataagatgggaaccatgtaattttcttttctgccttatatgcaacatacattataatttttcctgctgtaagaactccctgtcctccaaaaccagcacatataatttcattcaacatattatttcctccctaatcaataaattctccaagtggatactttggaacaagttcattttcaattctcttcatagcatctactggctttaatccccagtttgttggacatggtacaagcacttctattaagcaaaaacctttcttttctttttgtttttctagagcttttttgatgtatctttttgttgtatttatttctttagggttagttattgttcctcttgctagatatgctatatctaaatttcccataacttttacaacatcaaatgttgaaccatgatctgcgtaatttctacccgctggagtagaagctgtatattgaccttctatagtagttggagccatttgccctcctgtcattgcaaacatattattgttcataacaaggaatataacattatcatttctagtagcagctgacatagtttccccaagccctatcgcataagctccaccatctccagctattgtaaatatatatttatctggtctaactcttttcatagctgccattgctgcacccattttaccatgaggtggaacgacaacatctacattcatactaaattgaaacatatgattacaacctatatctgaacatataattgtatcttgacatatatccatttctgttaatacttctccaataattctatcgactatagagtgtccacagcctccacaaaacatattttcacacatcattattgctggtgctttcttagccataattaaaatacctcctcttgcttagcttttccatctataatctgttgagcaaaatctattaattgatttacttctgccatatattgagctgttgctactgaatatactggaaatctattatcacatgctataattacatcttccttcatctgtgccatcatgttcatttcaactgttacaagtcccttcaatgaatcacttaatttcttaaatgcttttcttgggtaaggccacaatgtttttggtcttattagacctaatttcattccttttgctctagcatctctaactgcaccttctgctattcttgatgaaataccgtatgccacaaataccacttcagcatcttctatttctatctcttcccatctttgttcatcttcttgaacttttctcattttttctatataccctttttgccatgtatcttggtcttcaaaatatgttatatcagttattactttatttttttctcctacaggtgttccttttgcagcccatggagctttatccatatcgtattctttcattggtggtgctatacaaggttctaccatttgacctattgtagcatcagaaagtataagtactggatgcatatatttttcagccaattcaaaagattcatatgccatatccatattttcttgaacactgttaggcgctaacacgattaaatgataatctccatttccaccgccttttactgcttgccaataattatcttgaccagctcctataaatccatcacctataccatatctttgcacacatgctacaactgctggcaaaccagctgatacccaatatgcaataccttcttgttttaatgaaaatcctggaccagatgaagaagtcatagctcttgctccaagtgcacttgctcccataaccatatttacactggctatttctgattcaccttggataaatactcctccaacttctttttgtctccatgccatcatttctaatatttctgattgtggtgttattggataacctgcataaaatctgcagccaccacgtatagcaccttctgctaaagcttcatttcctttaattaataaactttgcataccttttctcccctctaataaaaataatttataatatctcaaatactaaatcagggcacattgtataacaagcgccacattgaatacatttttcttcatcgactttaatagttacaaagccttttttatttgtgtagtcagaaagacttattgcatcttttttgcaagcttcaatacaaagatagcatcccttacatctttcaacactcaacttgactttttccatttctcaaatctcccctttatgtaatatttttacttaattttaaatatataatatttatattttgtataaatactatatatgcatcaattttgttctatagtatagaaccttgttctatttttattgcttaattaaaagataacacattcgcttatatatttcaataacattttaaattttaagaatatttaattttagattaaagaaaaataggctacatttaaactgatatttacaaataacaatttaaatatagcctatttttattatcgagattaaaaatcatctaaaaagttcagatatactttttgcagtttctataactcttttaatcttatactcaaagtccccttctctcattcttatagttggacctgacaaacttatggctgcaatagctttattatttttatctaagataggtgctccaatacaagttagtccatgttctagttcttcatcatctatagcatatccttgttcttttatttttgctaaaaaaagcatcatatcatcccaattatcaattgtatgttctgtatacttgtgtattggtgtttttctatatttttcaaaatctatagaatcattaaatgccataagacatttaccaactgctgaacaataacattcactacttgaaccaacggatggatttactgaaagtaattgatttgaaccatactctttatgtattatgatacttcttggagaatcttgagctctttcttctaatatagatacattaactacttcgttaaattcttgatttaattttttcgtatatggttttactatttcagtcaatgacattttttctcccacaaccatacctattgcatataaatttattcctagccaatacttaccattctctgcattttgtataacaaaacctttgttttcaagagtaaccaaagttctatgtacagtacttttatatactcccatagccttacttatttcagttattcccatttctctcttttcatgatataacagcaaaattatgtctagggctctatctaatgcatttattatttctcccatatacaaaaactcctcctgcaaatattaagtgctactcccacactctactaaatattatatattaaaattacaaaattatctatttatcttaattatattttataaaacaaaaatattatacttaatttgtaaaataaaaacaaaatactcactatgtccttattattcttacttttaatagaattattctgttatatttttatcctgactagataataatatatatatctattatacaatagatatatttttatacaagactaacaatgaggtgaaataatggataattttaaaaagatattgttaaatgaactacctaattttaaagaatattcttcaaaatttttaaatggagaaataaataaaatgcaatataagggattttctggtggatatggtgtttatgctcaaagagacaaaaaatcttttatgataagacttagagtatctgctggagttttatctcagtatcaacttaataaaatctatgaaatagctattaaacacaacttagataagatacacttaacaactagacaagctatacaattacacgatttatctataaattcaattgttgatatcatggaagaaggaataaaaaatgatatattcactagaggtggtggtggtaattatcctagaaatgtcggattatctccattatctggagttgaccctagtgaagtctttgatgttactccatatgcagttgctactgataaatattttatcaaaaatgctactacataccatttacctagaaaattaaaagtttcttattctaattgttacacagatactgctcattgtagtatacaagacttaggatttgttgctactttgaaaaatgatgaaccatatttcagagttttcttaggtggaggtctaggtaaacaacccaaagttgctttagaacttgatgaacttataaagccgaaagacgccttatattgtgttgaaggtatgattaaattctttatggattatggaaattatgaaaataaaaacagagctagggttagatatatggtcgaatcacttggtgaagaactattcttagaaaaatttaaagaatactataaattagaaaaagaaaatggtagtcttgaactcaatattgaagaaatagattactctaaacctggagttaaaatagatatacaagattctagactaatacctcaaaaacaggatggtttatacactgtatatatacatccagttggaggtattttgttaacaaaggatttaagtactttacttaaagaattagataatgttgaaaatcctatgattagactaggaatgacagagggattatatattttaaatttaaatggaaatgaagcaaaaagaatattagaaataagtaaaactattagttgtaattctcaattagaacaaagtatatcttgcataggtgttccaatttgtcaaatgggcatacaaaatagtcagaaaatgttacatgaaatcatagattattttagattacaaaataatgaagaaattttaaataaagcacctaagttatatatatcaggatgtttaaattcatgtggtgttcatcaagttggtagcataggtttatgtggtaaaaagaagaatgttgatggtatatctacagatgcatttgaattatttgttggaggcagttttgaaataggtaagactagattgggaaaatcacttggagattttaaagctagtgatattcctgaaatgctttataaaatatcggacgcatcatcaggcaatttttatgaatgggtaaattcaaatgataatattttaaacaaaataactgataagtataaaatataatttattatatttacttacaaaaagcatgggtgtctcaaaatgaactttttagtttatgagacactctttttctatgaaatcaaatatattttcatcatctcaacaatgaaaaataagactatctctattttgagacagccttatttcttataaatagtttaaattttatttataaacaattttagataaatcacaaatttctagcatagtatcatatacttgtttaagtaaagcaagtctattgttcttaatagcttcatcattatccataaccataactgtatcaaataaattatcaactactggtcttaaagatgcaaattcatctaaagcaataccatatttcttatcctttaataattcattaacttttacctttacttgtttaaattcattgtaaagtctaatttcagcatcttcttttaataaagattcatcaattttatcactttctgctttttgagctagagtagaaactctattaaatgcagtaagcatctccactaattcatctttttctagccaattattaagctctaaagctctcatatgcatatcagaaacatcatttatatcagaacttaaaacagcatcaacaacatcatatcttattcctaaatctttaaatagattttttactctctcattgaagaaattcattatttgctcaacaacttcttctttattaaaatctaattcagaataattatctaaagcatgttcaataagtacttttatatccacagcaacttttctgtccataagtatactaagtatacctaaagcttgtcttcttaaagcatatgggtcttgagaacctgttggttgtattcctatagcaaagaaacctgctattgaatccaacttatcagctattgataaggcaacccctgcattagtcttaggaagtatatctcctgcaaatcttggaagataatgttcaaaaatagcttcacttacaacatcattctctcctccaacttttgcgtattcttttcccataaaaccttgtaattcatcaaattctcctaccattccagtaactaaatctgccttagataatttagcagcccttatagtatctgccttttcatctactaaacctaaactatcaagtatatcagcacttaatttttcaagtcttaaagttttgtcgtaaatagttcctagttttacttggaatacaacagtttttaatttttctatgtagctttctaagtttctcttagtatcttctctatagaaaaataaagcatctgcaagtcttgcttctaaaactttttcatttccagctttaacattgtctattctgtaagaatcaccatttctaacagctataaagttaggtaacagttttccttctttaagtactggaaaatatctttgatgttgtttcataggagttataacaacttcttttggtagttttatataatccacatcaaattctccataaaaagcagttggatattcaactaaataagttacctcttcaagtaaatcttcatcaaattcaacttctccacctaaagaatttgctacttctatacattgttttcttatcatttcttttctcttgttttggtctaaaactatataatttttttctaatttttcaaaataatcttctatagaatcaacttctattgtactttcacctaaaaatctatgaccttttgttacattagaagatattattccttctaaatcaaactctaatactttatcatttaacaatgcaactatccatcttataggtcttgcaaatttaagattttttcctccccaacgcatagcttttgggaatactacagattttatagtctctggtaatatgtcttttagtacttctgaagtttcttttccatcttgctttatagtcgcaaatatatattcttcttttccaacttgtttaaaatatatgtcagattcgcttaatcctttgctttttataaatcctaatgctggttttgttaaattattttctgcatcaacagcaattttcttagcaggaccctttatttcctcttctaaatcactttgtctatcactcaatccttcgactactaaagtaagtcttcttggtgtcccatacgcatttattttatcaaaagctattctattttcatcaaataatttactaagattgttttttaattgttctagtgtactgcctacaaatcttgatggcatttcttcaacaccgatttcaaataaaagataatttttcattatttgtcaccgtcctttaaaagagggaatcccatttcttctctttgttttacaaaagtttctgcaacagtctttgccatatttctaactctacctataaatgaagctctttgactaactcctattgcacctcttgcgtccaatgtattaaatgcatgagagcattttaacacatagtcatatgaaggtattacaaggccattttccataagtcttaatgcttctttttcatatatatcaaacagattaaacaacatatctgcatcacataattcaaatgcgtacattgagttttcatactcagctttattaaatacttcaccataagttattttatcattccattttaaatcataaacactatcaacttcttgaatgtacatagctaatctttctaatccatatgtaatttctcctgtctcaagctcacattcaatattacctacttgttgaaaatacgtaaattgagttatttccataccatctagccaaacttcccatccaagtccccaagcaccaactgtagcagcttcccagttatcttcaacaaatcttatgtcatgctcacttgggtcaattccaatctcttttaaactttccaaatataattcttgtatattatctggagaaggttttagtataacttggaattgatgatgttgatatagtctgtttgggttttcaccatatcttccatctgctggtcttcttgaaggctctacatagcatacttgccaaggctcaggtcctaatgatcttaaaaaagtattaggattcatagttcctgcacctttttcaatatcataaggttgcatcatgatacaaccttgctttgaccagtatttttgcaacgccagtatcatctcttgaaaattcataaaaatccctcctataacaataaagcctctcgtctacacgaaaggctattttaatagttcttctacaacttttagaatatcaaattctataaaatttgtcaatgttagtgataattcttataattatcttctcttcattttttaaaagtcactttatatctatttattttcgtcttcgtcttctttattcttttcagattcttctttcataaggtcagcagttacatctttgtcatcttcttttttgtcaactactacatccttcacatcttttgctgcattagttatcatattcttcaaaacgtgaagtttttcttcattcaattcacctaaatctacaatttctccatcttcttcattttgaacttttatacgatatttacttataacagcagctgataatccaactaaagtagctaatggtacaaaagctaatccaacaactccaactgttaaaggaatgttcatcatagtttttccatctttttcaactattattctcactacactactttttctaagaagctcttttaattgaaactttatattttctccatctttgccaaatacttcttccatagtttctttagcagattttgctttacaattacaagtattttttttattttctaaatatattactgcctcaattacatctccattgcacattactaatgcttcttttgcttctgcataagttgctcctggaactctttcaaagactgaatcaaccatttcaatagttatattactactcatcattatccactcccttattattttttacactttgcaatacgtgtaatgatttaaaattaatattatcaacataaactttcaaatacttgtctagaatattctcaagttcatgtgttatatattttgatactttagctttactacatgttaaaatatcatttcttaatacatattccataagacttatagttgttaagtctaattttatattattatcaaaaagtttactacacttactacatagtataccaccttcgtagatattaaacacagaattttgtaaaattttacattcacaattaatgcatttatttactataggtttaaatcctatatagtctaaaaattttaactcgaatgctgctgttataaacctattgtctgtattatcctgtgtatacaaatacagagtctgcgcaagtaatataaatagcctattattagtctgattttcaagtatagaattttcaactaattttgtaatatatgtagcataagaaaatgcctctatatcataggatatattataaaaactttttattatttcactttgagtaaccttgtacatattaccttgtttttttaaggtaaaattgctataagaaaataattgtgatgatgaaagcaaagagctcttattttttttagctccttttgctattgcagatacttttccaagctttcttgtaaatagtgtaagtattatgtcactttccttataccttatagctttaagtactatcccctgggtgttcaggattatcatcgtcttcttttttctcccttacttcttcaatttcttcatgtatgtttttgcaatcacagaaatataaatatgcatctatactacctgtttttttaaaaacttcccaactgatattgttcatttttaaaaaacccccttcttacatttatacttatatttttagtaagaagaggataaatcatacataaagttattaaacaatttttgacaataatgccgttgttattataaagtaaactgctataccagttatatcaagagctgtagatataattggtgatgaaactgtagatgggtctgcatccattttttttaataaaacaggcataaacgcacctattgttgcacctaaaaccatatttataaataatgatattgaaacaattaatacaatgtctaactttctcataacaaagtaaattacaatacctgttattatactacacaaaagacctgtaataatacctacaataccttctctaaccacattgctaaaatttaaatccttattagataatgttattactgtaacagatgatgattgagttccaatatttccacccataccaattactacaggtataaaaaatactaatggagcatatacaggattcattatatagtctaagttagaaagtattaacgaagccaacaaccctccaaccaaggtaataattaaccaaggtaatcgtcctctaagtgctgatattatttgctctctcaatgtagggttttctttttcagcaacttctctttcatgttctgaacttcctgcaaatttatacatatcttcagttgcttcttcttccattacatcaattatatcatctactgttattattccttttaatttttcttgtctgtctactactggaattgctattaaattgtatttagatactaatcttactgcttcttctctatcttcatctacataaacagagattatattttcactcatcaaatcttctactatatttgcgtctctagctattattaattctcttaatgacaatactccaactagtttttcttcatcatcaaccacatatatataataaatagtttcagcttcttcagcttcttctctcatatggtctatagcctcaagagctgtcatatctttatttatagaaatatatccagtggtcattgttccaccagcagaatcttcatcatagaatagtaactcttttacataatcggcattctcttgattcaaaagatttattatgtgttctctttcttcttcttcaagttcactcaacttgtctgccatatctccaagagacataagttcaagtatatttttcgagtgttctacatccagtttagataaaatactaataaaaaactctacactaccttcttctaatatagaagatgccatatctaaaggaagtacttcaaataattgaattttcatgtcttcctctaaattttccattatatcgaatatatcaattatatgatattcctctattaattctcttaactccaatactttattattatcaattaatgattttacttcatataataaatcttgggaagcatccagtttcctatccatataacccacctttatttatcattatatccaaaattatttatataattttgtaaatttctccaattttctttgactttaacccataattgaagatttatttgtgaacctaaaagcaattctatatcttgtcttgctgacttacctattccttttagtttcctaccattttttcctattattattcccttatgtgaatctctttcacagtatattacagcagatacatctactatttccttatcatttctcgctttcattttttcaatttcaacagctacaccatgaggtatttcatcattaagatagtgaagaactttttctcttataagttctgctattaatactctttctggctggtctgtaatcatataatctggaaaatactttggcccttcttctaaataattttgtataacttttattaaggtatccgtattctttccttttaatgctgatattggtactatttctttaaaaataccttctctatcatacattttgattatatcaaatagctcatctttttggtctagttggtctattttgtttacaactaaaattattggtgtcttaacacttcttaaatcctctattatctttctatctccaggacctatttttttagaatcatcaactacaaataatattaaatctacatttttaaaagcttctgttgctgcctttaccataaattcacctaatttattttttggtttgtgaataccgggtgtatctaagaatactatctgcatttcttcatctgtatatactgcttgtattgtatttcttgtagtttgaggcttatcactcattatagctattttttctccaactacattattcattaaagtagattttcctacatttggtctacccactatactgacaaaacctgatttgaacattaactgtctcctaactttttatcttcttgttttaattacttaaatttatttatacttttaaatttattttaaatcatttccagagaaatagtttggcaacaaatcctttatactatgctcaaacacctctcctttagtatatcccgttattatttttatatcagaaccaaactctataattacctgcctgcatattccacatggatatgtttgctcattattttctgagttatcacttgctatagctattttatagatatccttatcaccctctgatattgctttaaaaatagctgttctttctgcacaatttgttccacctaatgatgcacattctatattacatccagtataaactttaccactcttagttaaaagagctgcacctactctaaaacctgagtaaggagcataagaatgttgtctggcatcttctgccaaccttaacaattctatgttatccacaacaactcctcctgtatacaataattaaaagttatttttatttaatactctacattatatcataaaaatttaattagcacagatttgttttattttaaatattttatgtacatttattttaattatagaacattccaagctgaaatactaatatagctatcaacacacctaataaagctccagcaatagtctcccaaaaggtatgtatttttccttcaattctactttgggcaactaatacagccattatatatgcaagagtagaggcaacaactctttcagtcataagtgtaattgcagttgctatagcaaatgctaaggcagcatgaccacttggcattcctccttttagaggagtacctgtagaagtcaatgcttttacaactacaacagctataagaaccaataatatacatatcaaggttatatgtaattctgattctcttattttataaattaatattccagatatatctgtcaatttatcataaaacaaaatatatccaactactactgaatttagtgctgccactagaacgcctccagctgcaacatcttttgctatcttagcaagaacatgatattcatcagttactaaatcaacagctttttctatagctgtattaaacatttcggcaactacaactaagcatatggacataagtaacattatcatttctaattttgaaaagttaaaaaacaaacttattataagaacagcaactgaacctaaataatgtattttcatatttctttcaaatttaaatgtatacaatatcccttctatagctgcattaaatgctttaattataccttgacgagttttttctggtttcataaaaactactcccttgttatgtttaacttatttaatatgtgttcttctttttctctcatttcttttgtattttcatctgtatcgtggtcataacctaaaagatgaaacatactatgacatattaaaaaacatacttctctttcaaaactatggttatactctatactctgttctaaggctctttcaagagatactactatgtcacctagggattcttcttctaactcaacatcctcaaaatcatcacttaaaagaggaaatgataaaacatcagtcactctatcaactcctctatattctctatttaattcatgaatctctttattatctacaaaagaaagactcacttcataattatcatcatatccttcataatctaaacattctatgattatatcctttatcttttcaattaactcctcacttacttctaatttatcttgtctatcatctagtatcaaatccattcactacacctactttttattcattaataatgctatatatctatattactacacttttactttcttttgaaagtcttttcctgcattttcacttttttacgttcttcttttttaaattcttctcttttgtcgtgcttctcataagctcttattattctctgtaccaactcatgtcttacaacatctctatctgttagcattatagacccaatacctggaacacctttaaggatctctgtagcttgtattagaccactcttcttattttgtggtaaatctgtttgagttacatctcctgtaactacagctttagagccaaatccaagtctagttaaaaacattttcatttgttcagaagtagtattttgagcttcatccaatattataaatgaattatcaagtgttctacctctcataaatgcaagtggtgcaacctcaatagtacctctttctaaatacttattaaatttatcagcacccaacatttcaaataaggcatcatatagtggtcttaaatatgggtcaactttgtcctttaaatctcctggtaaaaaacctagactctctcctgcttccacagctggtcttgtaagtataattctactaacttcatctcttttaaaagcttttactgccatagcaaccgcaagataagtctttcctgttccagcaggtccaacaccaaaagttatatcattattttctataagttttatatattctttttgacctaaagttttaggttgaacagcttttcccctttgagttatgacgattgtcccctcaagttcttttattttttgttcacttccttcaagcaaaagagataatgaataagaaatactctgcttatctaaatgcttaccatttgatacagtttggtgtaattcattcataagttttaatgcagaatctacatttttttcttctccaattaaaattatattgccttctctaagtattacatctatatttaaagtcttctctattaattttacattttcatcaaagttgccaaataactctctttcaaagttaccatctgctattgtaaatttcttttgtattatcaattgaattagtcctcctaagattttaagtttaattttattagttgttattgctattattattttgactattattactattttgattactattattttcatcagaattgttttggtctttattatccttattatcctcatcaaactcatttcttatatcatttaatggtcttttttctggattggaaggaacttcctcttcaccttcatctggtttactttcttcctttataaacctttctgcttctgacttactaagaggataaattttagcaatattttcactagtttgaactgttattaaatattctaacatatttttattaaccttaaagttatgttttacatctattattctagccgaagctgggattatgtattctaactcttttaaagctttttcagataattctttttttaactcttctttattcctttttacttcaaccttttttgtttcataaaaagtactcgtttttatctttattggaaaagtatagtttcctattgatagttttttttctttattttcaacaacataatctttatattttatattttttctcattgtaaactctttatcataaaaacttagtgtatatatatttttcttttctccagtttttttatttacagtatctacataacttgccttttttgtggactcataaaaagtacttgcccatacttctggtattgacttggtattagctccatttaataagacatctcccttttggactatgtctccagatttaataactgatttaccacttctagggattaccttttctattataccattttttaaagcaattacattacaataatttgattggtctgtagattttagggattctgccttttttgtaacagtaacaaatatatttgttccttttacattgatagataaatatgccacatcattaaattttgacatcatatggtctctaacttcttttctatcaatactcttcttatagactcctggtcttactccaaccttataaagctcatttctaagagcttctttttttataccttcaggagattgtatatatacatctgtcacaaactgcgatgtagacatcaataaaaataaagaaacaagagcacaaatccacatacctttgtgcttataaactcttttgataataaaagggaccccagttttttgctttacctttatatcaaacttacttcctctataaacattcttaaattcttttatatcttgtctatctatatgaaactccattttagtattttttattctagttacattgtaaacacttatcccatttcttataagatgatttaaaaattgttcgagtcctactccttccacaactataacatagtatccccttataaaacttatcaagtgtatctcctcctaatcaacatactcaacattgtagataatcccttttatacctatctcactatcagtaatatacttaagtgaaagtttatccccagatattttaattgttttaactttagtctttattcttattaaatcaacttcatattctaatattgatagataattttctatactaataaacgtattacttgtaacagtaataactggttgatttacttgtaaatcagtggatatttctaacataagcattacccccttaattaattttatgcttgaaataggtatttatgcactttattgatgttgtaacagattagttttaaaatttttatataataaatacctaatatctaatatattatttaaacaataaaaaggtaatcatattgataaaaaatcaacatgattacctttttattttttcttatataaaatctaaacgtatacaatttttattaatcttgttctattaaaccatatccaccagctttacgcttatacactatgtttatttcaaaattatcttggtttctaaacatatagaaattgtgtcctactagttccatttgaagtatcgcctcctcagaactcataggttttacattaaatttctttcttctttctattactatattttcatcttcttcatcatcataatcataatcatcaaattcactgctattatctataaagtcaagattttcaaatcttatgctcttattattttgaactttgtctttaactttagttttatatttgacaacttgtctacttaatttgtcacaaacaatatcaattgctgcatataagtcatcttctacatcttctgctcttattatttgaccgttaataggaattattgtaacctccactttttgtctatcctttttcgcacttactgttactttcacttctgattcaggatcaaggtatttttctaacctacttaattttccatctacgtatccttttattccgtcagttaatttcatttgtctcccagatactattatttgcataaaaacctctcccttcaagcctttccaattctaatactttaatatgttaatctttaaatacaatttttataaatttattgtatttaaattaatattattgtatatgaaaatgattatttttaatagtctatttatttttcgtttgttatgatattattaaaagtacagggtaatttacaaaatctttacattctatttattaataaaccatataaaatagttcaaaaatcctgcataaacaagccacattaaataaatcaaatttatgtatccagatctcttatctattttagaaaacttcgaaatcattattatagaaaccaaaatcattattattatatctatcaaagctgtaaatctaagtccaaatccaaaaaatagtatactccaaataaagtttaatacaagttgtaatccataataaaaaattgcatctcttaccttaggtaagttgtaaccctttcttaatattaggtatgaagatatacccatcaatatgtacaatatagtccaaactataggaaagataaaagctggtggtgcaaagcttggctttgtgagttgtaaataataggttgaaatatctgttccactgataatcattgttaagatgctacttaagtaacctattattagtggtataaatatgtttatcaaaaaattcctaatctcttttactgatataatcaaatttttccccttctttcaaaattttctttgattatagatatgctcaaatatgactcgttattcccaaaaactataaaaagcctagagatttctctctaggctatatcaatctattgtaagttttgttttaccaacttatttataagttttccgtcagctcttcctttaacttttggttggataactgacattatttttcccatatccttcatagaagttgcccctacttcggatatagtagattttacaatttcttctaactcttcttcgcttaattgttgaggtaggtactcttttaaaacttcaatttcaccttctgtttcttttattaagtcttctcttccagctttttcaaattcaactaatgcatctctacgttgcttcaattgttttgctattacatcgataattccatcttcatcaagctcgaccctattatcaacctcatactgctttatagaagctcttattaaagttactacagattttctcactgtatctttgtttttcatcgaagatttcaaatcctcttgtaacttttgcttaagggacatccccttcacctctttattcttatttactactatttcttagcgttttttcttcttgctgcttcagcttttttcttacgcttaacgcttggcttatcatagtgctctctttttctcacttctgacatgatgccagacattgcacattgacgcttgaatcttcttaaagcgctgtctaatgtttcattctctctaactcttacttctgacatttctttttccctccctccaatagcgcaattatgctgggactgtaactatgttctttttgcataatatgcattacaacctaacactttgtttattataaactaaatttttacttttatcaagtatttttatcaagaaggaactcaatttttcaataatttagtttagttttgtcccgcttcgtaattaggaagctttttaccagctaaaatatgatagtgcaaatgtttaacttcttgccctccatcacttccacaattatttatgactctgaatccagtttggtcaaaacctttctctttagctattttattaataacaacatgaatatgtgacacaatgtccatctctttatcaggaatatcaattaaactatcataatgttttttaggtacaactaatatatgatatggagcaactgggttcaagtcattaaaagctaagactctatcatcttcataaactttagttgaaggtatttctccgttcgctattttacaaaaaatacaatccattctttccacctcctatcttataaatattataatttctacatgttatagcaaaattccttctacatattcatcttttacatcatttattttcacttttaatatctgaccttgtatatttttgtcactttcaacaacaactcttatataatttgaagttaatccctcatatttattgccttctatattttgttcaaacaaaacatccagctcacggccgataaatttagttgcaaatttattaaaatttactttacttaaatttaaaagttgttcacttctaaagtgtttcatttgagggtcaacttgattttccatagttgcagctggagttccttttcttggtgaatatttaaaaatatgcatttgtgaaagctctatttcttttaaaaactcgtacgtttttttaaactcttcatttgtctctccaggaaaacctactattacatctgtagttattgccacatctggcattttacttctcaatctatctacaatagttttgtactctaaagttgtgtatcgtctattcattctttttagagtttcatcacatccactttgaagtgataaatggtaatgaggacaaactttatccatctttaaaacttcatttacaaattcatctgtaaataaaattggttcaacagaactaagcctaattctttctattttttctatctggtttatttgttttattacatcaagaagtttaatatccctatcctttaaatcttttccataagaggcaacatgtattcctgttaatacaacctctttatagccattattagccaattttttcacttcatcgactatactatcaatatctctacttctaacgcgtcctcgggcataaggaatgatacaataagtacaaaatctgtcacatccatcttgtattttcataaatgctctagtctttccattagtttggctgatttctatttcttcaaaagctttaactttcattatgtcatcaactgtactaactttcttacttgaatttatctttttaatttcttcaacaatctttcttctatcatttgtacccatgactaaatttacttcttctatatccaaaatttcttctggagatacctgagaataacatcctacaacggctattattgcatctggattcttctttttaactcgtcttatatattgacgagattttctatcactcatatgagtaactgtacatgtatttataacataaacatcagcatactcttcactattgacttgttcataaccatctttctcaaatagttctagcatagcttctgtttcatattgattaactttacacccaagtgtataaaaagctacttttttcaatttatttttctcctcctaaatcacttagttcatacaaagctattgttgatgctacaacagaagctgtctcagttcttaatattctaggccccaatgatacaacattacaattatttttttgtatttgctctatttcttcttcagaaaatccaccttctggacctataaaaattccaacactatctatattagaatcacatttttttagtgcatgttttattgaaactgttctttcattttcataagggcaaatatttacattattttttttcatatcttctaaagcttctttaaaacttaaaacacctcttaattttggtatcttacctcttttgctttgctttgctgcttcataaattattctttcccaacgttcaaattttttatcttcttttttgtcatcaactttaacaacacttctcttagtttgaactaatattatttcttctacacccacttcagttaatttttgaagtatcatttccatttttggagcttttggaagtccctggtataaccttactttaagttctgattctctatttatatcaactttttctaaaatctctaaattaactatactcttatctatattcattatctcacaaatatactcattattattcttgtcacatatttcaagtttctcacctagtttgcatcttaaaacttttgaaatatgttttacatcttcaccttctatagtgcaagttttatcttgtagatttatattatttttttcaacaaaaaatctatccattatacgtcaccatatcccttattttttaagcttagaaactattgctgaccattcacctaatttttgaacttcaactatttcaaatccattttcaattaagctttctttaacttcttctactttatccaaaattatacctgaagatataaatatagcatcttctttcataaagttttgaacatcttttgcaagtatctttattatatcagctattatatttgcaactattacatccgctttatcttttattacatcagttaaattaccatgcattacagatacacttttttcaactttattttcaagaacattttcttttgcaacttttacagccacttcatctaaatctacagctacaacttcttttgctcctaatttagctgctgctattgcaaggattccactaccacatccaatatcaaatactttagaatctttattcacatacttttctaattctctaatgcacatactagtagtttcatgtgtccctgtaccaaatgccattccagggtcaagctctatgattaaatccccatcttgcatagcataatcttcccatgtaggctttactactaccctttgtcctacttttgttggtttgtagtatgctttccatgcatttgcccaatcagcttcatttacttggtccaatgatacacttccttcacctatatctataccaaaatcttttaatcctaaaactttttgctttattatttcgacaaattccatcacatttttttcttcagaaacataagtttttataagaacatcatcttcttcattctttttaaatacttcttcttcaacataatcccagtctagttcatttttcttttggaataaaaagtcttttgggtcttctattacagctcctccagctccttgttcatatagtatattcgttataggttcaactgcttctgttgttgtttttatagttacttctatccaattattcataagtttacctctcttctctatagtaatattcctgtttttccataacttttattatatcataaatataatattttgttgttttatattattggttttaaattcaagctaataatatccttatataatagtcagaatatttaaaaatccgattagttaattttaaacctaataataaaacttctattatatctactatatcaatatttgaaatccacttagttaatcttaaacatacaaaatctccaacttataattattttcgcgatgtacctgaaacccacttagttaatcttaaacctcaaatttattatctatatacacttgtagacactctatctcacaacttatttttccttttaaaaaatagtttttacagtgggcttacagtagtactttttgtattttcaatgtctaaaggtatattatatttaaacatatgctcacttcaaaattaagcctacagtactattatactcaaacttactactagattttagtaccatgtatccttctactttgcttattaatccataataatataatctattaaatataaaccctgatacttgaatcgaatcttgttgtaactccctatcttccttataaaaatcttcttccagaataattttgtaactaacatcaacatctctaaaaattttagctgcttccttcttactatcaacaatatttttgtaaggttcaaaattaaaaattaaatccaatccatcaaaaatttctttatttataccataaatattcttaatttctttatcacaacttataaaattctcttcaaaatagtttttaactacactattatcatagtaatcatccaaaatagtttttctaatccccattgtaaaaatagagttagtttttaatatgtcctttaagatgtttttagttgtgttcttaagtttgttatcataaattttatcttcactaggtagaatataaaagtttccatattcatatttattatttctattgcatctacccattctttgtattaagctatccatagttgctaaatcacttattattatattgaaatccaaatccaaggatatttctactgattgagttgatatccaaatatcaccctctccatttaatattttactatatttctcttttttatctttgaacttaaatctactatgtaaaacatctatatctacaccaccatacttatcagataaattttcttttaaaaactcatatgttctattgactgaatcaatagtattctttattataagaattttttgtttattttctaaagcaccttcaactattgacttgatttctttttcctttataaaagaaacctttacatctttaccttcacaaatttcttcttccttgttgctctcaataaaaactatttctcctttatcagtaacattttcattactttcttcttgaaaaataattcccttgtttatcatttgctctttatatgattttggaagtgtagctgtcattaagtgaaaatcaacatctaagtacttgcatgcaaactgcataaaatatatcaaaatcaaaaacatctttggttccaataaatgtacttcatcaacagttatagatgcattttttacggctgcgaatattttttcatatcccggaaatttaaacatactaagtaataactggtcaactgttgcaattacacaaggtttacaaaaatttatactcaaatctatatcccttaatgtcaatacaaaatcatgttctccattatcttcattctctgaatataagtttatatctccatgaagtaatccaatgtaatcattactacttcttgtatctaaatcatttttattttgaaaaatattttttctataaaaactttctgctgatattttatttggcactaaaaagaattttcttttaaaagtctttctataatctgcagctgtttttcctgaacctgtaaatgcaacagtcagaacatttcttccagaaagttctctcaaccttttttgtatagtattgaactctatattatttttttctaaattaccctgactcttatatatctcatttaaaatcatatcatcaatttcttcatcagtaaaatcgttataaaattttatacctttctgtctacttgatgcactatggtctattaagttcagcatccctttatataaaatatacttaaactttctataatttaaaactgaatcatctatttgaccattgttataatcactgtctataaacatactttcacttaatttatctatgtaatcataatccaatacatcttcaccaaatttaaaatctacatttaaaatgtcatttatataactttctatatctttcagattaaactcttctttttctaaaatgcctttttcaatataatcataaatttcttcttgaactttactagtacttaacctcatataatcttcatagtttccatgatgtaacattatacttttatatatatataacttatcttcttctaacaagttcattttttctaatatatcttttaaaaatgctccagaaaatatattgtgtcttgctatcttttttaaagattttttgtcagactctaactttttcctctcttcttctgagcaactatacgatattttattattaatctccattttttgttgcataattgaattaatttttcctaaatcgtgcaaagcacaacatatttttagtatctctacatctttatctgaatatagatttagttctaatatagattctaatacttcaaataaatccttaatatgttcaactaatgtttgttcttgttgattagttcttaaattatatgacttagctaatatttctttttgcatgatatttttcatgataaacacctatctttcaaaataatttaaagccatgtaaaaacttcttttgtatcaatacatacattacatacatttaccttaatatttttaggatatataccatcattatcaacatatatataatggcaaaactcataaactctatcatctctatttgcttctaaatctttatatttataaggtaatgcaatcaatacaccttgatttattatagtctcgacattctctttatctcttaagtcaactcttacatatgtattctttaattttatattttcttttatagcatcacgagtattcataggcataacctcttttaactcaacttctttcacaaaacaccctttttcacttggtattacaaaatcttcttttcttcctaaatttgcatatttacatggactttcaagcttttttttaataaattcaagttcttcatcatccttgcaagaaataaatatagtcagttctacttctttaagaacttcatagtttaatatgctattttgagctttatgttctttatagtaatcatagtagtttccttgaagcaaaaacttttctttatctttgccttttctcatatttgtatattcattccaaaaatcaatgttctctcctcttgaaaattctagttctctatgatgatgtgttccaattattcctatatctatatcagagtttaatcttctatcacataaatacgttatcattcccattattgtggtcttagatggtaaatttaaagtacttatatattcattttgaaatacttttgggtctctatagtgagcagttggttgcttaagtttacattgtaatactttcataattcaaaaaacctcctactcttttaaataccacatattatcttctccaatttccaatctatctgctagatttttaatctcttttacagggtatttacttaaattaaacttatttaattcctttttattagaaatttttaatttgtcattgatagcaagtattgtgttactttctttaaggctataactttctatagtttctatgactccctctaaatttatctcaccactatcagcattataatctacatcatcccaaaaaaacggtacaactttatcaaaagctccacccattactgcaagtggttttaacagtactgatgaatgttttatgtttcttgtaaacacagtaattgcatctaatatatcttttactgctttttctcttaactccttactcataaattttctttcttctggtaaaagcaactttccatcttctacttctactactcctattctatcaagctccaatgttattgtataaacgtagtaatctgataaagtctcttctattgctaatgcttgtgatgttggaaagttttcatctctaagtacttcattttcttccttctcatcataatattttctaccaaattcgctacttaaaaaacctctatttgttatcaactgtgttgaacctctatatgaatttaatgacctaaaaggtattattctaagcggagaagccttacttatagaacctttatctttaagtggtatcaaataaccaaatacatcagtctctaatccattttcatctacacatcctacattttgcttaatagatggatatatatttccttttttcccaaaaataatattacttaaattccaaccatattcttggtggagcattcttcttaaatcatatgttattgtggctatactagtttttgcatgtattttttctctatattgttctttttttattggtgtataatttccatacccttggtcatatgaaagtggaactgggctttctgtcagtatagttaatgttactccttttactcttttttcattcattttaaattttcccccttttttatttcatgatttcttgaataaatagacctacattcgtatttaattctaattcagaactctgcattagaccttctacaaacccttctcctattaagattccattagaaactaacacatgcattatagtttgaaatagctgagttctatcattagacttaagtagttgaatcactttcatagaaaaattttttcttctggattcatctgtcattttattaaataagtctttacctactcttgaatatattaaattactttccatatagtttttcattttatactcctcccctccatctacaatccaacacaattttatatataaaccgatattatatgagctagatacaaaatccatttctcgagaagttccagttagttgccttaaaacacttatattatcaagtaataattcttttaaatttgataaattcccattatcaatcatttttttacccaaatttctagtattccctggctctcttgaaaaattataattatctataatatctataagttcaattttttttaataattctttatactctataatagagtcaaactttagaattatacctttattcgtatcaatatcaaacctatatagtctaatcgaacttattttttcatgcaaaagttttttataaaatgatttatctgaatacatctttcttttaagcattatcttatgatttaaaaatgctaattcccttaaatcattcgtatatgcaaaaaccattggtctttttaaatttatatataaaagacacattaagttgaaaaattcacactcaaaacaaatattactttcaacttgtccacttcttttaaagcctgatttttctgcacctctaaataaaaagttatacttagagtcctttcgctctcttaaatcaatatctagttttgttgttttatttatattacaaacattacatacactatctttttcttcatattgtgtcaaatcaagtttatctatttcatctatctctatatttgatttaattacagtatctactattctttttacatttgtttccatattttctaaactcgtgtttaatccatacttaccactatttctaacatatggaaatcttctgtttttaaaatcttttttaatcccttccttttgtttctcagttgcagaagatttatctaattcttcaataaaatttacatacgttaaattatctatattactaaatattttttctaaggtttcctttttcccatttttaaataccttaaaaagttgattttctaatatataatcagatatatacttagggtctatatattctgcagattctaaagataaataatttctatttaactcacaagtaaattttagcttataatcatttttttctagttcgttttttaaatccattagtaattcataaaagtaaacaatgccaatatctcttacaatatcacctgatctataaaatttagcttttatttctctcacctcgctactttaatatatcaaccattcctgcattttccgtccttctatatccaattcccattttatacagtgcatttaaatcttccatatttccttttaaaaaaaatgttcctgcataagcatttatatagtaatattctctcactttaaatccacgaatcttttcttttaacactctttttttgaagttaagaggtataaattccaatggctttctaagcccactacctcttatactctccagagttagattagctatatagtttaaacattctatataatttgaatcttctacatctaaatatttaccttctttattctttactattataggagacatagttttaaatataacaccattttcttttatctcgtgttctttatgtatttttatattttttattttaaatctataacctttatattctagctcctttacttttaaaattccattgtataatttactgaacatagaataattataaaaacttatattgaatattatatctccatcaacaagcaactcatttttgcttcttataagatttggtatgtagatggctgtatttatatcctttatttgcttattgttttttctttcttccccatagttaaatatatttttagcaaaatctttgttttctgcatttaaaatattttttataaaggaaactgacaacattgaattttcatttggaaatttgccattacatgactccataaaaattgaaattctgctcatattttcacctcctactttctagtataattcattattctctatttgtaatataaaaaataaaacatatcataaaatgattttttgataataaatttaattttgttttttaattttttaaatatattttactgttagttttattctttgctaaaaattaaatatacatattaaacaaatacatttagtcattttacacatttaatataataaaaaaatttgatactatatcattaaaatttaaatatcaaggagaatattatgtcagaagtaattttaaaaaatatatcaaaactttactcaaatggatttaacgcagtaaaaaatataaatatagacattaaagataaagaatttatcgttttagtaggaccatctggttgtggtaaatcgactacacttagaatgattgctggtcttgaagaaatctctgaaggagaactatacattggagataaacttgtcaatgatatagaaccaaaagatagagatatagctatggtttttcaaaactatgctttatatccccacttatctgtttacgaaaacatggcatttgcacttaaacttagaaaattgcctaaagatgaaatagacaaaaaagttaaagaagctgctaaaatattagacttactacctcttttaaataaaaaacctaaaacattatctggaggacaaagacaaagggttgccttaggacgtgcaatagttagaaatcctaaggtattcttaatggatgaacctctatccaacttagatgcaaaacttagaactgctatgagaacagagataactaagctacaccaacagcttggaactacatttatctatgtaacacacgaccaagttgaagctatgactatggctgatagaatcgtagtaatgaaggatggagtagttcagcagattgcaactccacaagatgtatacgattatccagctaatatatttgttgcaggatttattggagcaccacagatgaattttattgatgtaatattaatagaagaaaatgataaaatttatgcacaaaatgaacatattaagcttaaattgaataaagaaaaacactatgatttaataaaagacaattatattaataatgaagttgttataggtatcagaccagaagatattcatgtagaagatacttttattaaatctaatccagatacttgttttaaatcaagaattgaaataaaagaacttatgggagcagaaacttatgctcacttaaaactaggcgaaaatacgataacaattagatttgacagtaaaaacagaattaatgttggtgatgacttaacactttcagttgacaatagtagagtacacatatttgacaaagaaactactttagctataagataagaatataatcttatttttaaggagactttatggaagagttaaaagattttttagaaagacagcttaataaaaaaataaatatctatccctatgaaaaccaaaagttagatgctagtagccatttagttactttcaataatgctatttatgttattgattttctagataaaaataatcttgataatttaaaaggcaacttttatttaatttaccaatctcatatagactttgaatacctaaaaaatattttttataatttatttgaagatataaatataatacaacacaatggtttttttatagtaaattctaaatataatttagatattaatgtaactacacaaaatataattgaaactgaaacttatcaaagtacttatattttttatcttggtgaattagatagtaaagctgatttttattttagattacagttatgttctgatttactacctcatattataaaagacaatgctgaaaataagtttttaaatttgtttgaccttattagatataaaactttagatttaattaatgaggataatatactcaataaattaatagattttaataagattaaatctattgacgaagaacttctatatacaggaataaaatttataaataatgatttaaatatttctaagacatctactagtatgtttttacatagaaacacgctagtatatagattggaaaagattaatgagatacttgggtttgatttaaagaattttgaaaatgcaatgattttttatctaagtgtcaaatcttattttctctataaaaaaatttaactactaaattaagcagagatttgaaagactagttcaaatttctgcttaattttaattcaaaatattgtatacttatcgagtactctatgcttcaaaacttagaattaataaatatcaaaccagttatgttttacaaacaatatttttaaacttatcagttattagacttattaaatccataaatccactattctacttttcttaattctttctttaatataaaatttaataaaaaacttattgtacctaagaccaccataacataacctaatatctgaaattgttctgatgttatatttccttcaaataccattccaagtaaaacagttgctaaaatagaacctaaataacgactagtttgaaacagaccagaagctgtccctatactgtcacgaggactttcttcaaacatagaggattgcagggctacattaccaactccataactaatacctgctaatgataatataataccctttcctattacaggtatatggataaaaactactgaaagaagtactgcactaataaacataaagattgatgatgtaacaagaggaaatctagttccagatttatctatccattttccagttaatggagatataaatatacctataccagacataaatagcataaataatccagtcgactttgcactataatgtaaggcatcttgaaaataactaggaagaccaaaaaacaaaatataattaaagaaatttaatataataaattgcaagtaaacttttgacaatttaggattacttacaaaaagcttaatatctataaatggcaattttgttctcaattcatgccaaataaaaagacacatcagtattataccaaatacaagttgttctaagttaaaagattccttcatagatagcaaaaatagtaatataaaaatcattgcaattgaaaatagaagtatgccaataatatctaatcttgacaaaacattttttaaagtttcttttatagatttcttttcttttacttcttttgggaataaaaaataccctaagcatatagaaaccaaaacaacaggtatatttacaagaaatatagcatgccatcctcctaagtccaacaataatcctccaagtgtcggacctaatcctgctgtagttgaagcaaaaatggttagaactgctaatgcagaagattgtctttcttttatattattttgtataagagcaactccagatggatatagggtacttgttccaattgcttgaattactcttataaaaatcaatataaagaatgattgaacaagtggtactatggatgctgataaaattacaagcatcaaaccactcaaaaataagacctttctacctattaaatctcctatcttacctgaaactggttgtgcaatagcactagctaggtaaaatgctgaaacaatccaagatacagttgtaaaactaatatgaaaatcattttgtatactatgtaaagcaagtgaaatcatagaagaattaagaggattcagcatagttcctgaacctattgctatcaaaaaaagcgttcttctagcatttgttttacccatatatcatcacgcctccaataagcagttcatttacattataaaaaagctgctcctataattcctgcgtctgaacctaaagttgcacatgtaattgtagctatatcttctgttttgtataatacaaattttcttaccaaatcttctattccatcaagtattatatcgctagatttagaaatgcctcctcctatagatataatttctgggtctaaagaatttattgtgtttgcaaaagtttttgctaaataatctttaaatctatttattactttaattgccactaaatcattttctctatatgcatcaaacaccatctttgcatttacattttctaaatttccctctgccaaatctaaaatcctactcttttctccttcttctatcagtttttgagaatactttataattgcagttgctgaacaaaaagtttctacacaaccattatttccacaattacaattaaaatagttttctcctataatttgatgacctatttctgaacccaatccatgtgctccagaaaagactttttgattaattactattcctccacctacaccagttcctaaagtatataatactccaacattagcacctttcatacttccaaactttgcttctccaagtgctgctactgttgcatcattttctccatgaatttcagcatctggaaatcttctttttaactctttattaaaagcttttttattccattttaaatttacacaagttactaatccttctttatttataaaacctggaacaccaaatccaatagattttatgtcactcatagtaagtttattatcttccaacaacttataaatcattatttttatgtcattaagtattccttcaaagcctttttcaattactgttttacactctgacctaaaaattatcttcccatagttatcaactactcctgcttgtatacctgttcctcctatgtctacacctatataatacatctcttttcacctttctcttttgaatcatttaattttatctatattttattatatatatagtatattaaaatgtgacactatgcaaatttttcataaaagtttatgaacaaagcaaaaacatcctctcacagtatattttactatgagaagatgtctattttattaattattttaatttggcaagtgttcaaaacaaactatatttaaagcaagtattttaaacctttgtctttacttatttttttatctacaaccttatttataattaaacatcaaacaaatcttaagcacatttttagttggtataaactaactttctataaaaaacaatctcaatgttttagcaatttatactaaaaatttttcatagattataagtatatttctttacatatacccaactagacacatattcctttacatacacatctagcacaataaccaataccatatacatatttctttacacatgtatatactaaaagtaattcacaactaggtttccctaattacattctaatcagatataccctttataaaaattttaactcatacaaaagatttaaaaattagataccttgtctatataatattactattttactactaaaagtttgagtctaggtaattacaataattatcccagctcatgagtttttccagtacttaatctagcactaaaagtatctaattttattttgtatattacaataaagttttcttcatcatttggcagtgccacatccgttcccactggaatcacccctttcttttatttgattatattatagcacattatatattttaggacaagtatttttcagaaaattatttatattcagttttattttatgcacatttattttttatacaaaaatagccaatataaaaatcataatatctcctttgacaatcttataaataactaagatttcaaaaatatgattatatattggctactttaactactttttcttaaacatatcttctatcttttgtccgaaggttttcttcttttcgtggacgttcgacccacactccttcgcaaattctctcaatagttctttttgcttatcgtttaattttttaggaatttcaactacaaccttaacatattggtctcctcttgaattacctctaattctagggattcctttctctttaagtctaaatacagttccagtttgtgtcccctctggcacactatatttaacttttccatccaaagtaggtacttctatctcatcacctaaagttgcttgaacaaatgtaattggcatttcaaaataaatatcatttccatctctagtaaatagtggatgtgacttaacattaactacaatatataagtctcctcttggagcacctttttctcctacttcaccttgaccagaaagttttatcatttgaccatcatctataccagcaggtatatctacttctatagtcttaacttttcttgtatttccagttccatgacatttactacatggagattcaatcacttctccagttccattacaggcactacatggtcttgaacttgctatattaccaaatggagttctttgaacagttctaacttggccagttccattacaagttgaacaagttttctttgatgttcctggttttgctccagttccattacattcttcacactcttcacttctatttacttttatagacatctttttaccaaatgcagcttcttcaaaagatatagtaacactctgtcttatatctgcaccacgttgaggccctcttcttcttgctcttccacctccgaagcttcctccaaacatgtcaccaaatatatctccgaacatatcttcaaaaccaccaaagccttgaccgccaaatcctccttgaccaccaaaaccaccttgaccatttaatccatcatgtccaaactggtcataagtttttctctttgtatcatcagatagaacttcataagcttcatttatctctttaaatttttcttccgcctctttatctccaggatttctatctggatggtacttcattgctaattttctataagctttttttatctcttgagcttctgcatctttactgatacctaagacttcataataatccctttttgtactcaaaaattgacaccaccttcattttacaaaacgatagcttgtagaataataaactacaagctatcattaattcttatattctactttaagttatataatctatgatatattatattctttatgatgtgtattgtccatatatctttaacatctatatgattttcacaaatcatatatgttccaattatcatttagtgttacatattatatagcttatttatcttcatctacttctttaaagtcagcatctactacattgtcatctttaggtccattgtcttgtgcttgttctgcaccttgtgccgcttgttgttcttgagctgctttttggtacatttcttgagatactttttggaacttagtcattacttcatctgtagctttcttaagttcttctgctgtagcatcttgattatcttttacagcttttaagtctgctatagctttttctatatcctctttttcacctgaacttattttatctccaagttcatttaaagttttttcagtttgatatatagtagattcagcttgattgaatgcttctattttttctttcttttgtttgtcagcttctgcattcatttctgcttcttttatcttttgctctatttctgcttctgataaattagtgtttgatgttatagttattttttgctcttttcctgtacctaaatctttagctgaaacattaactataccatttgcatctatatcaaaagtaacttctatttgaggtattcctctttgtgctggtggtatatctgttaattggaatcttcctaaagttgtattgtcataagccatacttctttcaccttgaagaacatgtatatcaacagctgtttggttatcagcagcagttgagaatatttgagacttcttagttggtattgtagtatttctttctattatcttagtcattacattacccatagtttctataccaagagataatggagtaacatctagtaataataaatctttaacatcccctgctaaaactccagcttgtatagaagcacctgctgcaacacactcatctgggtttatacctttatgaggttcttttcctataaacttcttaacagcttcttgtactgctggtattcttgtagaaccacctactaataatacatcatctatatcacctgtagaaagtcctgcatcttgtaaagctgtcttagttggttccatagttttttcaactaaacctctagttaattcttcaaatttagctcttgataaatctatatttaagtgttttggtccttctgctgtagcagttatgaaaggtaagtttatgtttgaactcattgttgatgataattctttcttagccttttctgctgcttcttttaatctttgaagagccattttatcatttcttaaatctacaccttcagcttttttaaattcatctgctaaataatctattactatttggtcaaagtcatctccacctaatctattgttaccagctgtagctaaaacttcaaaagttccatctcctatttcaagtatagatacgtcaaaagttcctccacctaagtcaaatactaatattttcttttcttggtctaatttatccataccataagcaagagctgctgctgttggctcatttattattctcttaacatcaagccctgctattctaccagcatctttagtcgcttgtctttgagcatctgtaaagtaagctggtactgttataactgcttctgttactgtttgtcctaagtaactttctgcatctgattttaatttttgtaatattattgctgatatttcttgtggagtatatgattttccatctatatttactttataatcagttcccatatgagtttttatagaagttattgttttatctgcatttgtaactgcttgtctttttgcaggttctccaactattctctcaccatcttttgtaaatgctactactgatggagtagttctcataccttcactatttgctattatttgtgcttctccaccttctaacactgcaacacatgaatttgttgttcctaaatctattcctattatttttcccatgactaaaatcctcctcgagtaattatataattaagttttacttattttaatattttatattaggttaaataatttaacctttaatttatacttagcaagaaactttaaccattgaaggtcttacaactttagttcctagcttatatcctttttgaagtaccattactatttgatttgcttcaactccatctacactttcttgcataactgctagatgtagattagggtcaaattccttagattctgcttctatttcttctactccaaattttaccaaagtgtctattaattgtttatgtacaaggcttatacccttatacatagtatcttccttatcttcacatgcatctaaggctctttccatactatctataactggtatcaactcagttattattttttcatttgcaaatacgcctattgtctctttctcttgttgagttcttcttctgtagtttgcatattcggcttgaagtctttgatatttatcatttaattcatccaactcatcctgcaattttttttctgctaacttagaatttatatctgttacattttcatcatcaacttctttttcatcagttttttcacttgatgtttcacattcttcattaacaacttcctcttctaactctacttgagtttccgattcttggttaatagaagtatcattttcttctcttacttcctgttgctcattttttttatccaagactttacacctcgcaatttaaaatttctttactttctattaattaataaactcatataatttattatagagtaaattctagcataatccattctggtagggcctataaagcttattcgcccaaccaagtctctatctacattataagttgctgtaactatactacaatcctgtgccagttcacaatcattatcactaccaattattatatttagattgtctttttgtattccctttgatttaattatgtcagctattgtttcctttttttccaacatatttaaaaatgactttgcttttaatacatcattaaattctggataactaaatatgttagtagctccatttaatgatagagaaaaatcttcttctttcatatttgagttcaaagcatttaaaagctcatctataagtccagaatactcacttatttcgtatttaataaaagcaattagattatcatccaaatctgttatacttttacctaaaagcttccttgtaagattatcagaaatcaaatttaacttagattgatctaaatatacattagttgtaaggttagctttttttaagtcccctttatctgttacaactataagtaaaatattattgtcattcatagcaaccaactgtatgtgctttataacactttgatttattaaactcttagtaactgctacagttgtatagtttgttagttgcgataatagcttagaggtttcatgaatcaattcttttatatgatttatattatgattcatacattgttcaataagaatcttatcattatcatccaattcgcttttactcataagagagtttacatataacttatagcctttttcagatggaactctacccgcagaagtatgaggctgaattaaataccctaattcttcaaggtcagccatttcatttcttatggtagcagcactaacacctaaatcatgtcttttagatattgttctagaacctatagcttcagctgtttctatataatctttaactatagctttgaggatatttaattttctttcatttaattccatattattatacctcctagctgttagcactcactaagttcgagtgctaaaaagattatatatattatataccattataaatttattttgtcaacaccttaaaaattattccataaattctataaatacactattagatatttctcttcctttttgagttaattgtataccttcaaagctctgatttataagctttctagctaatagcatttctatttgcttattatacttctctctaaaatctattccaaatttttttttaaaatcttcaaattttatgcctttattcattctaagccccataaatatcttttcttctatcatatctttctcagaaagaatttcattttcttgtattggtttttctctttttaccaaacttaaatgataatcttctaaagattctacattattgtatctgttctcattaatatagccagaagctcctgctccaatccctatataatgttcacattcccaatataaaatattatgctcacaattatagccttcttttgagtaatttgatatttcatattgattatatccttttgactttaagtagtttattgtatactcatacatttctatatctacattttcatctataagctcaaatttattactttcatacatattatatagttcagttccttcttctagtataagggaatacgctgatatatgtgttggatttaagtgtacaactttttcaagagtttccttccagtcacatagagtttgatttggaagactgtacattaaatctacattaatatttttaaaacctacacttaatgcatctttatagtttttctcaaattcttcataagtatgtattcttcctataaaattcaaatgcttttcttgaatggcctgtagccctatactaagtctatttatgccaatctctttcatagtttttaatttttctaatgttaatgtcccaggattacactctatagttatttctgcattctcatctatatcaaacatttcttttatacttataaatacttctcttatttcatcagatgttagtatactaggtgtacctccccctacaaatatactcgttattttgtcatttttatttagactacagcattctttatttttatatttattatctttatataatttattactatataatttcatttctatttttaagtcttctatatatcttttttttgaatctatgtccattttataagaattaaaatcacaatacttacattttttcacacaaaatggaatatgtacataaagtcctagcattttttattcctcatttcttaaattatcttaaagcatcaattactaaattataaatcaaacaaaataacacatcaagtaatatataatgcttatattgtataacagtataaaaaatttggataaaagttaattttcacctttacccaaatttatctaacttaaattaagtagttatctttttttcatataataataaactggtaaacctaatagtgttataaatattccacctaaagatataattgttgaagtcaatatttgatttattattacaaacagtccacctagtatagctataattggtattattggatataaagggactttatatggtctgtgtaaatctggcttttgtcttctaagcctcataacacctataaaagtcaatacataaaatacccatattgaaaatatagttaagtctgtcaaaagattaaattgaccagataatgcatatacacaggctaacacagttataagtagtattgaatttacaggagaacctccagaatttacttttaaaagagttttagatgctggtaaagttcccatttcagctaatgtataaggtatccttgaacctgttaataaatatccattcaatgtcccaaatactgatattaatatacccacagttattacttttccacctatatttccaaacaatcttgttgctactaatgtagctggggaagtaactgttgctaattcacttgctggtactacccaaagataagctatatttattataatataaactgccataactaatgataaaccaccaactattgctcttggtaaatctttctctggagacttcatttctcctgatatagctccaacatttatccaaccatcatatgcaaacaaagtagctattaatacttgtccaagtgcatttgatgcatttacaccatctcctacaaatggatttaatacttcactactttgacctttaataaatccaaagactattattaaaattaaaggtatcatctttccaatagtggctactgtctgaacttttcctcctaaggatgaacctattatatttaataacgctaaaaatagtataactccaattgctataggaagtacatttgccatattatttgggctcattcctaaaagttcagatgcttgttgagcaaatattactcctaatgctgctgatgtacctgggaaaaataatacagtttgcatccatccagttaaaaagcctaacttttctccatatatttcttcgatataaatcatcataccaccagtttttggtatagcagctgaaatttctgtagctgtaagcccagcagttattgttataaaaccacctaaaagccacgctataatacctagacctggagctccattagttgtagtgtatattgcttgtggcttaaaaaaaactcccgaacctataaccatacctacaacagtagaaagagccgctgaaagaccaatagtcttttgtagttgagtatgcatactgtccctcctcactgttttacagtatataaaatattaattttataaatttatggttttagtattcccaaagtttttttttatattagtctatagtcctagagtaaatgctatgcgtttaaaaatcatacaatcgtaacttctaaaatattctctaaaaattatttattttatctaaataagtattttcttctataattttttaaagtaattaaattttttatatttgaatctaaaatgtatatatatttaatgctttttcttttagtatttctttttcatttaattctggattatttatgactatttcaagcatcttatttaaaatatgtcctatatctttacctggttttatacctatagatatcaaatcttttccattaatagctaaatctttaagattaaagcactccttttgatttattatatgtttaaattctttttcacactcaataagatttaatatcttttgttttgcatactttgggtttttggcaagtgtatcagcccaattaacttttattaaatcttcaaataattcaacatcttcaagtttatttaataactttttaattatcttccttttaggttctattctataatcatgatattgtattaatattaaaactttattaatagtataattatcatacttaagtcttctcaaaatcttctttgcaatctttacagattctctactatgagtataaaaatggtcaacaccatttttatcagttgttttagttacttttttacctaaatcatgaaacaacattgtaagttttaaatacagttcatcttcaattacttctgtagatattaaagtatgtttttgtacatcatagatgtgatatggattgtgttgagtaacatcttctaattcacatatttcaggaattataaatttcaacaaacctgttgattttaataagtttaatttagatgaatcagatactaatattttattaaactctgtctggattctttcgatagaaacattttttatcaaatctgcttttttatgaatactttgcttagtaccttcagctattttaaaattaagttgtgctgaaaatctaactgccctaagcattctaagtgcatcttcttcaaatctatctactggatttccaacacaacgtatatacttattttgtatatcttcatagccattaaatgggtcgactaatcctgtctttgaattgtatgcaattgaattgatagtaaaatctcttcttgacaagtccttaactatgttatttgtaaattctattgaatctggatgtctaccatcactataatttccatcaattctataagttgtcacttcaaatggttcatgttcaatcataactgttacagtcccatgttgtataccagttggaattgttttttcaaataattctactaccacttctggtctagcactagttgttatatcccaatcgtttggaactctttctaataaacaatctctaacgcatcctccaactacataagcttcataaccattcgtttctaattctttaattatatagtctacttttttaggaatttctatattaatcataaatatcacctttttattcttctttaatatattcttacttatattctctatgagtttacttaaaatataccacaaaaaagctagattaatttagaaataattctaaaatcactctagcttttaaatatatttatctaaatttataagaatttattcatctagtttaagtacagacataaatgctttttgaggaacttcaacagaaccaatttgtctcatacgcttcttaccttctttttgcttttcaagaagtttcttcttacgagatatatccccaccataacatttagcaagaacatcttttcttagagcgcttattgtttctcttgcaataaccttattaccaacagcagcttgtataggtatagcaaactgatgtcttggaatttctccttttaatttctcacacattgcctttcctctagggaaagcacgtgtctcatggacaataaaactaagtgcatccacttgttctttattgattaatatatcaagttttacaagtgtagatgctacataacctttaacctcataatcaagagaaccataacctctagttctcgattttaaagcatcaaagaaatcgtaaacaacttcattgagaggaaggtcatagtgaagcattactcttctctcatctatatattccatatttaacatatttccacgtctttcctggcaaagctccataacaacacccacatagtctttaggaactattatatctccttttactataggctcttctatcatctttatctcagatggttctggtaagtttgcaggattttgtatcattacaacctctccatccatttttgtaactctatatataacagatggagctgtagtaattatatcaaggttaaattctctctcaagtctttcttgcattatctccatatgtaaaagacctaagaaaccacatctaaaaccaaatcctagtgctgctgaagtctcagcttcatattcaagtgcagcatcatttacttgaagcttttcaagagcatctctaacattctcatacttttctccttctcctggatatataccacaatataccattggagtagcttttttgtatcctggtaaaggttcttctgtaggattatttgaatctgttattgtatcaccaacacgacaacttcttatatcttttatactagcagcaatataaccaacatcacctgctgataattcactaagttcagtttgacctggagccataacaccaacttcagttacctcaaactttttattggtattcatcatttttattgtcataccctttttaacagttccttcaaatactctaacataagctacaacacctttgtaagcatcatagtaagaatcgaatattaatgcctttaatggagcttcattatctcccttaggtggaggaacattttttacaatatcttctaaaacatcttctatgtttaaaccagttttagctgaaataagaggagcttcacttgaatcaagccctattaaatcttctatttcattttttacttcctctggtcttgcacttggtaaatctattttatttattattggtaatatttctaaatcttggtctatagcaagataaacattggctaaagtttgtgcctcaacaccttgagctgcatcaactactaatagtgctccttcacatgcagctaaacttcttgatacctcatagttaaagtctacatgtccaggtgtatctataagatttaaataatattcatttccatccttcgctttatacattaatcttatgttttgaagctttatagtgattcctctttctctttcaaggtccatattgtcaagtaattgacttttcatgtctctttcactaacaagcccagtttgttgtattaatctatcagctaaggtagactttccatggtctatatgtgcaattatactaaaatttctagttctactttgtttattgtccaccttaaaattccctcctcttgattattcttatagttattattttacattatctaaaaactctttatataccaaatttaaaatttttgaatataaactaattggcactaaacaaaattatccacattatatgtggattatcaagtctaacactaaatattatataatatcgtaaacttaaagtaaatcctataaaatacagttaatgaatttttattttatacattaaaaatatataactaaaataaggcttattttaatcaataaaccttattcacttattactacttattaaatttttttatgatttcatgtatatcaaaatttggtatgtcaaaatcaaattttgttatatcaaatttaatacttggaaaatcatattgtttcattcctagcatactttttgcattactgtctactataaatacacaaactgatgtacctataatcatagtaatcaaaaataagattctcataatatacttgtattttcttagtttacttttactttctatatttttttctaatcggctcatttagcatgctcctaattataacttaaagctctaatttttttgtttaaaatattcatctaaaatctcggctaaatactttgtagtagccttagattcttctacacttgttgcgttattccctatttctactaacatatgattcttaactgcaaactgattgaatctagcatagtctttttctactattggagatactagaccaggatactttttctcagcaaaagcagttatatcttctgctaaagctctaagttgttttctatttgtatttttacctcctacaacaaagaagaactttgatactctctctccatttatcatagttgtatattttaaatggtctttttccttagtggctggattagttaaatccctagcatctctatgtaagtctatcgctatatccactgagttatatttaggtaatatactttgtattgtttttaagctacttgcataagagttattataagatggatagtcatggtatttagtagtatggactacaccccatcctttgctatctaaagcactagttaatgcacttcctacttccattactgaatttttcttatctcttgaatgataatttccatcaggtgaatttgaataagtctcacatccatgagtatgatatatcaaaattcttggattttctttggttactcttaaatcatccttataatctgaactagatgttgtgttagtttcagttgtgtctgaattttttgactcaatatctggaacattttctttaccaacataaagttttatatattctttttcactctcttttttattatcaactttacttgcatctttagatttagtgttttcttctttactttcttccttattttctttgcttgtttctttatttttattattctttttattttctgtatcatttccttcgactttagcttctggataagatgaatttactaaaaactttaaaaaatcatcctgattcaaagctaatgattttcctggtaaaatgcatgctaatataaaagtcaaggttactactttaatgcattttttaaacataattgctcctccttattttataccaatctacctggatgtaaagacctatttaagccttcacttattattatagatagattttcgattgtatcatctatatcctttggtgttactattaagttcttgtcatatgggtctaacgaatcttttattagatgatatttttcttcttctttaagttttttcaacatttcataaaaactttctgtttcttctgattgagctattaaattgtctattgccatatctaagacatctattgtaagagttgctgcatcaaccaccgttggaacgcctattgcaataacatccacgcctaaagtttctttagttagagattttctagtattgccaacacctccaccaggtgatattcctgctgttgatatctgtatagtagagtttactctttccatttttcttgaagccaatgcgtctattgctactactctatctggttttactttttcaaccaatgactttactatttcactagtttctattccagtaacacccataactcctgggcttaaagctgatacctcagtgaaatcatcatcatagtctttattataatttttaaaaagatgtctagttacaagtgtttttgatacactctttggtcctaacgcatcagaagtaatatttctatttccaagaccaattaccagggtttttttatttttgtcttggccaaatatatctactaactcctcttttaaataacttatcatttcttctctcgactcatcatcatcaaacttcataagattactttccagagttatatactttcctatatctttattcattatctctgcgccttgcctgtctattacttcaactttagttacaatgcaattttctaattctttagtttctatttttacaccaggaatactacttccttcttgagacttttcacacatttcactagcttctaaagctaaatctgttcttacattaatcatataaacctccagtataaattaaatgctaattataattgttaacaaaatttagtattttataacaagaaattgtaaatttatttaaaacaagtaaaattaaggctttcaatgtaagaaaattgggtttagtcagtgatttgtcagtaaactttcttatctatcatttatttacaagcaaaaaaaggtagcaactatttatataggcgctacctttaatctatttataattttcctattaagctttcactaatatattaactaaaataacttttttatatttatacctaatttatttactatataaaaaaacagcaataattatacaataatcacctaacacctttattccttttggaaaaatggttctgcaatttccaaccattcatttggaagataaagcgataaatacccatgattatagcccttagcttcataaatctcacaagagggtacataagactgaaacatttttgcagattttttaacgcacttcatttctttttctccataccagtacattacttgtgctgtggtttttttaacattctctttaagtgtatagttcatcatataagtacgatacatattatagaatgtttcttttcttacatgtggcatatctgtcatataatacgcttttatttcatctggatattgcatattttcaggtaacaattttggcatcatagcaatttgaaagcgacaagccttctcactaaacaaaagtcctccaaaaaatcgaataccagcaatacaaaaccttgccataagaggtcttgggtagcaaatactaccatcaataattgcttttttagtaatattaggttttcgagataaaagttccatgacaatttgaccaccaagtgataccccacacaaagcgaaaagatgtccactgcaattttcatctatatatgatatcaacttatctgctgtatcctctgtagaaatgtatgttgtttcatattcttctccatgaccatccaatgtaggaagtatcacatgatagttgttagacaaaacttctgcttgtcgcaaatagttccaccacgcattccctcccccatgaatcaacataatatgtggtttgtttttatctccaaattcatgaaatttcatatacaacctccttttataaaaataagattcatgttattttgttttatcattatcaaccacaggtggagaagatataattgaaagttttctaagttttagatttgatttaggcttttgttctatatatggtttcaataaatcagctatacttttaagaagattttcatattcattatcactcatatatagtaatgctgaagagaaaaatacattatcctttttatggtcttgctcttttctgctaaagtattcattcatttcctgcatcagacctacataaaatgctgtagaaagtgcaacgaaggtctctccttccatagatgttgtatattcctttagtgcataaaccttttcaatagtaccacgcacacgattttctttaattacttcaatcatattgttctcttctaaaatttttacatggtgataaactgttgcacgaggaatatcatttaaatactttacaatatcagatgtgcgagcactgccatgaagtcgaatatattgtaagatacgaagccttgcaggatttaaaattagttttgctatgtccatcttatcagccctttctttagtctataaaaatattatagtctatttttttagactattcaagtctatgatataagtagtaattacaactataataaatgctacaaatgctattctatataaacactgagattaattacatataaccttctaacatattagttatattgtttgatgcatctatcatacatactaatgaaaaaaattatcttgattattggaaaaattatcttaattaagcatataaatttatatttttataatttttcattaaatttacaaaaatgagtaatttcttgtattttcttataattattggaaatactatcaaaatgtatgttaatagtttgtattatctcaaaatatttgttacaaaaataaaatattaatttatatatgtcaaaatatttaaaacacaaaatataccaatttaaaaacaagatattgcaaattatttatacacaatttacagtctaaaaaatcaaaataaaaaacattattaaaatatataaataataatccttgatttttagatttatttctgttaaaatctaatatgttgacgatgaatatgataaaaaaatacagggaggtgaacacggtggcaaatataaaatcagctaagaaaagaataagtgttatcgaaaagaaaactgctttaaatagagttagaaaatctcaaataaaaactgcaataagaagattcgaagatgctgttgcagctggaaacagagaggatgctgttgcaaagttccaatacgctcaaaaaagaatataccaagtagcttctaaaggaactatacataagaatgctgcagctagaaaagtagctaaattagctcaaaaattaaacggtatgaacgcttaattaccagtttatatttcttatatataataacccctatgtaggggttttttattttgtaaatttatacaataaaaaataaatagttagacatattatagttgattgtatatcaaacttaatttagcttacatctactctgaactataacatatcttgctatttattttttattaatatatagattttttaaattgcttctcttttacagtatctactaaccaacatttcaactgctaaagtatctcttataagacctgtttttattttataatcactttctaatatatagtttaatatttccacaattatatcatcagaaaaatttttagtttgctttaatgcttttcctacaacaaattgatgcatttttaatttatcagctataagttttgttgaatatccatcaagttgtaactgtcttacttgcataattattttaaattgtcttgctatcatagaaaatatacctaatacagattcgccttcttgtatcatatcatttaatattttcattgcattagaagcattttgttctccaatataatcgattaatttaaatatatcattctcaacttttttttgagataatttatcaattacgtcattggttacattattccctttaccaacaaaggaacttattttatttatttcattttctaaatcagataatgtcttttcactgctcttatctctgtatccttcttgttcaataaaatacatgatttgagaattatctattataacatcatttaaagcaaaagatttttttatccatttaaataaatccatatcagaaagcttatcacaatcaaaaacaattccattgtttcctattttcttaactaatgattttcttttgtctacatctccatatacaacaaaaactatagttgtagtgtctggaatattatctaaatgctctattaagtatttctcatcactatctgtaaaattctttttctttccttttaatagttcgaagtcttttattattactatctttctatcatccataaatggaagtgtttctatagagcttataagctgatttaagactatttccttcccatctattatatctaaattaaaatcaagcattccttcgtttagactatctttaaatgcttttattgcattctcaattaaataatactctcttccataaaaaagatacattttttcaaagtttttctcttttacattccttataatatccttgtaattcattctcttgctcctttatctcttttccttctatgtaaaatatgtaaaaaaacactcctatgtaataaataacaacaatataaaatttaggactttctatattaatgtatgcaaaacttaaattgctgattttttctagtaaaaaaaatatgctttctatcaatgtactattaaaaaaagatataattttagctattactacacttactttaaatacgattaaacttgcaatacttaaatacattattactcccacaaatggtactataattaaatttcctataattgaaagcaatggtatacctttaaatgtataataaattataggtaaagttaatatatttgatgatattgtcaatgataccatacttaattttataatactatttattttattatagaatattaatatagaaagtgtagctaaaaaagacaattgaaaacttacattatatataacataggggttattcataattaaaattatcccaattagagacaatgctgatattccatctttctttctatcaataaatattgataaataaaaaatcataacaaatgctatagacctaattatggatggagacgcacctaccattatacaatataaagttataaaaatcgacagtattaataatttatacaatttatttatacctcttaatagaaaggatataattacacataatattcctgtatgaagacctgatatagatattacatgactagttccagttctagtaaaaatttctttttgttcctcagtcaaattttcaacttctgctaatagtatagaatttataaaatctgagtttttcttatataagtacctataagttttactaatataaaactttatttcccctattaaagagtaaagtttatttttatcaataattttatagttatttatatacactatacctttatatccagtactttttatataccttccataatcaaaatcatcatacttcattttatctaaacttttgaatttacctgtaatattaactttctgaccaatcttcaaatttttattttttgtataatcatttattagaaaaacccctaccttgtactgattgtatcttttcttttcaatttttcctttgacaaccccttgtatagttattatcttatcattaagttcttcgtcgttttttgtgttatttgtaatgataaatgatatagctaccacaaacattaatataattaataatggtcttcttatttgaattataatcactcccatataaaagtatattatttagattattttcaaatagaaaatttttaaacaagataaattgttatctaaacaaaaaaatacgtcaaaagatttttaaaatcttttaacgtattctacctatatatattcatttatataggtattttttttagaaaaaatacaattaagtgtttctagtgtttcttctgaaacatcttttatatcatttaagaaaatagcttcatttacatctatataagaaaatgataactgtgttaaggtatttatatctaatttaatatcaaaatcttcttgaggcttttctgcaccttttttatctaactgctctacagataccttcttattctgtatagaaattttaaatagaccattattttcatctataaacttgtcttctattaataaattaaatgagctattaatatccttctcaatatctatatcttcaataaacttctttacatttataactcttcccatcataaaaggttttatttttatatcactatctttagggttgtctaatataaatcttatcttatctattgtaggagtagatatagtaactatcttacattgagtattgtgattatatataaatttaagcattgatttaagggcatctatatttttataaaataactctctgacaaacattttatcttcctgaagaaaataaactatatatccatctttttcatttccttcatgaatgtataaaaatccatcttcactttgaatctctttaaataagttttcataataatgttcatcttttaacacattaccattaacctcatttaaaaaagttctatctattcgtatcaaatcatcaatttgtgataaattagactttatcatttttccacttgacttaaaattttttaaatcatctgtgttaatagtatattcaatctggtcgtaacaatgctcatatccaaatcttctataaagtctatagtcaataggcatcaatatagaaactaattgcccttttttatacaattcgtttaaagtaaatttcattactttgttcatatatccagctcctcttccctctggaagtgtagaaactcctactacatatgatgtattatataccttgctatttagtaataacttatactgatttagctgaagagaagaaataatttttccttcatctaaagctactacagtattttcagatttatatttatcattaaaatagtacttcataaaactctccgtatcgttaaaacaataactccaaatctcttttatactttctatctcttcttctttagcatacctaatctccatatagtctattaagcctccctaacactgtacttttcaacaaatctgcaaggatgataagaaagtttagcttttcttaatccttcaatacctaaatcttcttctctatttacaaactcaacgtccttaaattcacttaccaaaaattgttgatttataaatggatacagacctcttatatcgggattagctttttctatatgaatcaatgccatatttggatttaaaagttctcctatactaaaagcctctaattttccatccacataaacaccaaacacttttaccttatcttttaatatgtcataatggttaaatatctttttgatacctattaattcgtcatccatactttcatcaaattcattattttcttccttattactttcccattccttcattagtactaaacactcgtcaaagttttctttatctaataatttagcttcatatctacctgcatactcttttaagaaatagtttatatggtttctcttcttttgattctttttaccagctagagttcttaaactttctgcatcataaatatagtcaaataaatctctttcttctatatactcaaatctacctggatatttttcttttaaaaactctactacttcagtagtaatacctcttaagtatatttttttattatttttagaaaaatattcaaggacaaaatctacaacttctggaagtttatcttttttagcaagtggtaatattgagaaactatctccttcgtattccccaactaaaacggcaaaatcttcacctatataatatcctgtcttataaacatgttgccacatatataaagtactaaaacagtactcacaagcttcataatctactaaatcaaaatatgggtctaactctttttttgaatttagttcaatatctttgaaaaacataaaatcctcctaccttttttattgcttaattttaaaaattttattttgtatatataaaaaactccaaatttattatggtattaatttcatttatattgtttaaaatataaaatataataagtcatatatatcttatattacccatcataaatttatataaacatgtaatgaatggagtgattttttattgagaaataaaatttttttatcaatacttattataatatcacttttaatcggctgtgacaaaaaatctctactatctatacatataattgatgttggacaaggtgatagtattttagttcaaacacccacaaataagaatatattaattgatggaggtgatgaagatagcgaaaatataattattagttatcttagacaaaaaagaataaaaactattgatattataatagcaactcatccagattcagaccacataggaagtcttgataatgttataaaaaaatttaatgtaaactccatatatatgcctgaacaatcaactgatagtgaggcttatcaaaatctaataaattcttgtacggataaaaacttatctattcagcatctctataaaaatgatgttttaaacatagataacaatataaatatatatgtattaagtccatcatatatacaagaagaatctaatttaaattctatagttttcaaattaacttttaacgataattcttttttatttatgggtgatgctgaagaagaaaatgaaaaagaaattttacattcttttaaattaaataatattaattttataaaaataggtcatcatggaagtaattcttcttcatctttagaatttataaaaaaaattagtccagatatagctgcaatatcatgtggatataaaaatcaatatggtcatccacatagggaggttattaataatctaaaacaaaaccatgtatcaatttatagaacagatagaataggagatattgttttttatagtgatggagaaattatatttacaaaatataattatgaaatagatacataatctaaaaaataaaactacaactacataaaataaggtaatataaaataattaggctaaaagtatgaatataaaattgctttatattcatgcttctagccttcaaatttgtatataaaatttataaattaaaatatttaaaacttattgtcctaatagttcatttactattacagatgcgattattaaacctcctacagatgggacaaatgatacactaccaggtgttacttttctaccattcattactttcttcttaagttctattggttgttcagtagaatatactacttttaactttttgatacctctatccctaagttctttcctcataactttagctagaggacaagtacttgttttgtgtatatctgtaacgactattttagttgggtctaatttatttcccatacccatagaacttattattttcaacccttttttttcacaagtttcaattagatgtattttggaacttaccatgtctatcgcatccacaacataatcatatctttcagttagtatttcgtcactagtatctttattataaagacttcttattttttttatattgatattaggatttatatctaatattctttcttccatgacatcaactttgtaccttcctacagttgaatgtagggctggtatttgtctatttatattggttatatctacatcatcaaaatctacaatagtaatattgcctactccagctcttgctaaagcttcaacagtaaaactaccaactcctccaactccaaatactattatatttgaattattaagtttttctatcccatcatctccaactagaaaactagttctcgttgtaaaattattttccatctttccacactcctagatttttatctaaatatataatagtattagaaaatttacattatataatacaaaacattatatattattaaaaataaattatcttaaaataaatttaaaaaggtatcttttaattaaaagataccttttgcatattggcgggaatgcgtgggaatcgaacccacctaagaggctcttaacccctcatactagttttgaagactagagggcacaccggcacccatccactcccataatgaaatccttctcaacgaaatctataatatcatatattttgactctttgcaacaatttttatagatttatctgatagtaaattataatttaaatagcttttatctatacatggttaaaatttacctgttttattacatatccaaaataaaaactggaaattatattttaagaatctataaagagtttcttctctatataatcaaaatataatttccagtaaaaatataaattatttaactattttaatatacgtatatctatagtttttcttccccagttataaaccgtttttgaatcattcatgtagatatcaattttatttccttttattgctccaccacagtcttctgcagtaaacaccatgtcaaattgaggtatataaactttagttccatatggtataaccttagggtctacagctattgttccccacttaggttttgttcctgttgcagttatactatgaccagtatatgcagttgctaccactctcatatttttaccattgttactactactgctactagatgatgatgaagccattcttcttgaactttctccccttgatgaggctacttgcatttctacctttgtccctttgcttacaaccttatttactggctcagctttaacaacctttttcacaaattccttttcaactttctttccattgtgataagtttctttatatattaattcacttttaccagactttccttcttctttaaccttagaatcaccctttaataaagagccatcttcaacaactgtaacttcaaatggaatgtctttagtttctacaactgttttttcctttacatcaattacttctattttatctccattagataactttgtattttcatctaaagttactatatcatttgcatcatagctaatgttttgagattctaaaaggtctcctacattagaactaaatgttgatatagttctttcttctccccttactactaatgttacttgtttattaagcgcagagtatcccgataatattccaactgataaaacaactgccattaccgagactttagcattactcaattttttaaaattcatataaaatttcctccctaaaattttttacactatatattttgcttcataaaattctgctttgtaagtttctttttttatttgtgttttttgtgtaactaaattgtaactattttttcaagagttgtcaacttgacaaaaaaatagaaatatgcatacatagtattttcaactatttaagcatatttctattagttacaacaatgtcattgtttattgttgttttgttatcattttgttaccttttacttttatatattttctatctgccaattaataggttcttttcctagctttttcaaaatttcatttatcttagagaagtgtttacatccaaaaaagcctttacttgctgacaatgggcttggatgaggtgcttccaaaatataatgtttacttgtatcaatcaactctacttttttacgtgcattacttccccatagtacaaaaataactgggtcttcacgctcacttaaaatagatattactctatcagtgaaaatttcccatcctttgttcttatgagaattagcttcatgcgctctaacagtaagagcagtatttaaaagtaacactccttggtctgcccaaggcattaaatatccattattaggtataaaacaacctaaatcatcttttaattctttatacatatttaatagagatggtggagttttcacttgtggttgaactgaaaaagctaaaccatgagcttgattatctccatgataagggtcttgtcctaatattaagacttttgtgtctttgtatgaagtgtgttttaaagcttcatatatattgtgcatatttgggaaaatttggcgtgttttatattcttctataagaaattttcttaagtttaagtagtaatctttttcaaattcttctttcaataattcatcccaatcgtttcctaagttaaccataattatcaccaattcctttcaattatttttattattttatttagaaattatatcttcttgattatcattcttttcatttgtatttatttttatgctcactctattaggtatacaaactatgctttgacttggcttgtttataaatccagtatgtacgcaaaccttatcagggcatgaagcatctactatctcaacccctttatcatgaatctttactatgttatacccccctctattctctattttaaattcttctttggcatttattgaaacagttttatacaatttattatctacataaatctcaatatttccagcatttttagaatttataacatttattatcccataacatgctataataacaaccaaaatgcctaaaataagaagaatgtcttttttcttcattttttgtcctcctatgaaattatgttataataaaataataacacaatttcataggaggaatataccatgaataagaaaaaaatcacatttatttttgtgatattgattttagcattaattttattttcattttttaggagttcaagccagaatactaaatatagtaaaactagctactaccttggtacagtaaacgaagttactatatttaatgtaaaagaatccaaaagtgataaaatcttaaatgaatgtgattcaattttaagatatattgacaacaaaatgagcactcatataccaggaagtgatgtttctaaaataaatgataatgctggtaaaaaatttgtcagagtttctgatgatacatttttcgtcgtaaaagaagctatacaatattccaaattatcagatggatattttgacataacaattggtccattatcaaatttatgggctattggaacagataaagctaaagttccaagtgattctgagatacaaaaacttctgcctcttattgattataagaacatcatattggatgaaaaaaataaatctataaaattaaccaaagaaaatatgaaaattgatttaggtgccatagctaaaggatatgctgctgataaaattgtagcctatttaaaatcagaggacgtaaaaaaaggtttagtaaacttaggaggaaatatatttactttagaagatggtaaaaatgataaaccttttaaaataggcattcaagaccccactagtaaaaatggtgaatccataggaaacatagaaaccacaaataaatctgttgttacttctggaatttatgaaagatttatcgaaaaagacggaaaaatatatcatcatatgttaaatccatttacagggtatccttttgaaaacaatctaagtagtgttacaataatttctgataaatctattaattgtgatgccttatccacttctacatttggacttggtcttgaaaaaggtatggatttaattaatgaaattgataatgtagatgctatattcataactaaggataagaaagtatatttaactaagggtataaaagataattttaaacttacagataaatctttttctattgaaaaattaaataaacaataagtttaaataataattatatctattatacatacaaaatacatatgaatttaaatagttatcacatgactaatgcaaatttaatttttatataaaatatggtatatacttaagtaatctaaaacaaattctacttatgtatataccatattaatagcttaaatttatataaaatactaattcaaccaaatttttataaagactttaaaaataaatccattctatttaaagcttcaattacattttccttttgagttcctaaatttattctaacatacttctcaccatcttttacaaaatgactcccatcttctaataatactcctgtatctatagccaatttatctgtaaactcacttgcacttatacctaatccacttatatccatccaagctaagtaagatgattccattttcatcaattttatcttattatatttatttacccaagtttctaaaagttcataatttgattttatatattcatttacaccacttaaccactcatgacattcattataagcggttatcaatcctattattccaaacacatttggagaagttatagaattttgctttaatttatttctaaatttatcccttatattcttatttataactattgaataagaagtctttaatccaccaagattaaagcccttatttggtgatgtcagtagaataacattttctaaaagctcttttccaatcttaagtattgaattaaatttaccataatgaatatgctctgcatgtacttcatctgcaaccaaaataacattattttctttacatatagttgctacccttgtcatttcttcaattgtccatatccttccagatggattatgtggtgtacaaaacatcattaatttaggcttattttctttaatttgaacttctaatttatcaaaatttatataatatctatcatttacaacatctaatgtattacaaattacatttacaccttgtttttttgctgatgattcaaaggggtcataaactggtgtgtttaatattatactatcacctttcttacaaaaagcttgtactacataatgaagtgttgatacagttccataagttaatgtaatccattctttttctacatttacctcatgcatatttttttgccaaccaataactgaatcataaaattcatcataacagtatgtatatccaaatacacctcttcttacagcttcaataaatttgttttctatttctgttggtattttaaaatccatatcagcaatccacattggtacaaaatcttctctaatatctccaaatttatctcttataatatttaaatcccattttctacacttttcacttactctatctggtttatcatcaaaattatacatttaaatttacctcttcttttcttattgttataaaatatttatctaatttatttttagcttacaactattaaatccttagtagatgtagtcaatctcatacatccatcttgtgttatgagtacatcatcttctattcttacgcctccaagacttggaacatatataccaggctctatagttacaatcattccttcttttaatacttcatttgattcaggagctaaggcaggatattcatgaaccataattcctacaccatgacccagattatgaccaaaattattggcatatccatatgaaccaattatgtctcttgcaactttatctatctctccagtagtcattcccggtcttaaaactcttatacactcttcattagcttttcttactatattatatatttcttctaactctttatttatagtacccatacaaatggttctggtaatatctgaacaataattattatacttagcaccaaagtcaaaagtaacaaaatctccatactctataattttttcacttgcttttccatgaggtaatgctcctctaagcccagatgcaactattgtatcgaaagattctttttgaccacctaaatcttttataattctaacaatttcattttcaacttgcttttcagtcataccaatctttataaagtctactatatgataaaatgtagcatcaactatttcacaagctttttttatatattttatttcgtcttcattttttgtttcccttaatgtagataaatcaactgattttaaggttgcacttaacttattactcatacttctatataaatcaaaagatacttcatttccctcaaatccaatttcctttatattctgctctctacaaatatcattaattatatcaaaatgagttctagttttgtccattaatactacattaaacaaactagattttcttttaatttcttcaaaatatctaaaatctactattatatattgtgattctttcgttataaaaacataacctgaagagctaaataaatttccaacataaaacttgtttgtaggactatttataagaaatccatctatatcatattctctaaaatactctcttactttttctatcttatccatatcttatctccaccgcctttaattaatcatataggtaaggctggtaatattgattaaaaccatattaccagccaaagttatttatagatagtaaaaattaaatactagtcgatataatctacaacaagtttaccatcttttattaatttatttctatagaatatatttcctactgctatgaatatagcaccaactgctatacctattatatatccaaataagttatctactagaggccatgcccatatagctgactctgggaaccattgaattgctcctagaattatacctgtaatagctcctattacacttccaactatgtttaaaggtataacaaaacctggtctctcaagtgcaaatggtattgctccttcagatatacccataaatgataagaatatagaagtttttcctgcttgatagaattgtctatcatatactcttcttcctactaatcttttatctaataatgttgttaatcctaatccaattggaggaacaactatagctattgttcttgctgttattggaagtacattctctgtagttaaaccaagtgcaacgaatcctgctgctttatttattggtcctcctaagtcgaatgctgtagctgctgccaaagctgttgcatatacatattctccagctgctcctgctgctgttaagaagtttttcatactttcattaattaatccaccaaatggagttattataaatatcatcaataccatacaagctaatgacgctattaatggtattaaaaatgttgttttaaaagctaaccagttatgagaaacttttatagatttatttaaccattttacaaaatatcctattatgaatgctattagtattgcacctaaaaatcctgatgcaactggaacaacttcagtccattgtccatcaatgaattgtggtacacctacaggtttattagctatatatccacctataaatcctgcaattaaagctgtttttccacctatagagtttgcacaaaatgctgcaaacagtggtatcgcaaatccaaacaaagtaaatccgaaatttgacattaattgtgctatatttaaaagactaagcttgaaccctgtaaattctcctgagttcatagcatcaactatacctacagatgggtcaagtcctaatatagcatatggtattaattgagataaggcccctataagtccacccattactaaaactggtatcatatatgatatacctgtcattatatgtttacttatttctttccattttccatttccctttgattgagttggactagatggagtagattttcctacattatttcctcctgttgtagaagcacctgaactgtttataacttttttcttaattgccattctatttcctccacaataaatttattatattcctaaatcttcttctatttcttttataacaccttctgcattttttatagcttcttgtaattcaacttcataaacttcacaaccatcaaatctttccataccttctggtgttattgctactgcatgtattatcatagttgctcctaatatatcatctcttgttaactcattttgtacaccatcagcaccttgagtttcaacttttgcttcataacctaatgcctttgctgcttgctctattgcttctgctgccatgaaagtgtgagctagtcccattgggcaagcacataatgctactaattttttattcatttcaaattcctcctatttttagttaattatttttttattttataaccttagtatttaattataaacctaaagcttcatttattaagttagatatttcttcaacattatcactttttaaaagagaatctttaaattctttatttattaattttcttgaaagagatgataataatttaagatgaatattctctttactttttcctggcataagtaagcttattgctaatttaaccttatcctcaccttcattccaaacaacatcttcattaaacttcaatactactactgctggattttcaattgcatcatttttagtgtgaggtattgctatagattctcctaaatttgtagtaaattgttcttctctagccattaaaccttcatatactaagctctcatcttctgccaaatttaagtctttagctttttttgatataaattttaaaacttcaacctttgacttagcatcaacatttaaaaatacatattctttgttaaatatgtttgttcccattattaatttcctccttaattacctatcagtgccattaatttattaaagtcacatattttaataattcctcttactcctccttcatcttttataaaattataaaggtatttaaatatcgagaaattatgcttttctttagtattaaaaaataccataaatactagctgaacctcttgcttatcccaaattattggattttcaagtattccaactcctattatagattttttatctcccttcactattgtgtgaggtattgctactagatttcctatttcagttgatgaaatattttctctatctattatactttttatagaactttcctctataaaatctctttcttttagtttatttgaaagtgaaattatgacctcttctttagtactagcctttatactgaaaaaagctttttcatcaaacatgttacttattatctttcttctttcttccttttcataaaaggctttgtttacgttttcaattaagctatcatcaaatatattttctatatataagacaggtttttcatatccttttaattcaacggtagatactatcaaatcaacatcttgacttatagccatatcaagatatctaactggataaacacctacaacacttaaatcacttatattctgttttagcttttcagaaataagttgtcctgttcctatcccataatgacaaactatacaaattttcttactagtattttttttcattctttcatttgaagcagcaaagtggatagctatatatccaagctcatcttcatcaagttttaaattaaactcagtttctagtttatttgataaaaacacggctaaattaaaagctataggaaacttctcttttatttgatgaagtaaaggattatttgattttacattagctctagctctatttaaaaatctctttatatggtcagagattgcaaccataaactcatcatcttttgtataatcactacctgaaataaggaatatatcttgaagtgcactacttataacactacttattcgttcctcaatttcacttgtgttttttcttccttgtgtacctttataagctattacaccagaataatttgaaatataaattacttcatcttcaataagtttaaatccaattttatcagatatttctttcattagattttctataaagtagtagttatgaaatctataacttgtatccattaagtttatattgttactatgacctctcttactcctaaatacagaaacaattatttttgaaagcaaaagattaaaatctttatctgaaattattgtatctttttctcttaagtgcttttctaaaatactttctatacagtatatatcgttttcactaatgtcatctaaaaacaccttcactttacttttttcatctaattttattgcatagtcagtaattaattgccttatattaatttcttcaccatgtatatagcttccatagtaaggtttagattttataactaagtcatacttttcaagttttcttttaagcttactagacaatttatttatagcggctatacttagatttaattcttctgccattgcttctatactcatataatttctattaataagcatacatattatatttgacattcttgactcttcagagtcatctaaaaaaccatcaatatatttatttgcttctttaacagctctggctatattgtttttagaaccgcttaacttgtatcctatacctctagaagaagctattaccaaatcatatttgcttaaaacactatttaaatctgctatatatcttttaatagttttagtagacacatccaatttgatagctaattcgtttgatgtcatatatccatctttattgcttaaactctttactattattgcatgtttcttagttatcattgtatcaccttctctttgatttcaattatatatcaagtaaaattttaattgtatatataatatgtctatataagggacattttgtatttatattttattacataatgtaattattgcctctgcatatatacctattgcagttataaatctatctaagctagcaaattcattcgcactatggacattgccaaagctaccatcaggaaattcacaaccaaatattactgaattattcatttcagaagcataacttcctgcactagttactctaacatcatttttcaaatctccagaatactttatatatatatcatgcaaacttcttacaagttttgaatttctatctatataatttgcttgctttaaattttccccaataagctcaaatttattaatattattttgctccatatacaaattaaatttttttattatatcttcaatggttaatatttctggatatctaacgcttaaaactacttctaattttccatctactatatttattattgttggcactattgataaaatcccacatttcccctcaatatttaaaccaaataagtttccatttatattatcttgatttatcaacttatataaatcttttgtccatttttcatcaatattttctgacaaaagtttaattgtagctaatataggatttattgatttttcgggtttagatgaatgaccaccttttccatacacaatataattgccattatcataatttatcgatatattgttaatatcaaaacatatattatctttacccaatttttctacattctttatataaactttatctggtattgtattaaactctattccaccacttatatataaagatttatcgtctatatttgaaattaactttattattgctccacctttttctccatttaatacaggaaatttagcatctggagtaaatccacatacaccatatggctctttgctataataatgctttatacatttaaatccactctcttcatttcctccagctattaatctaacctttctttttaaattaatatctaaatcctttatcatttttagtgctaaaaaattcactatcataggtcctttattatcagatacacctctagcaactaatttatcacctataatatttagtttaaatggttcactatcccatccttcacctggatttacaacatcacaatgtccaaatatatctacatattctttaccatttccatattcaatttgaacagcatgattatctatattttttactttgaaattgttttctctacctagattttcaaaccagtttaatgcatcatatactccttttccaaaaggcatatctttagatacagtttttctatcataaaatgaaggtatactaacccattgctccaataattttaaaaattctttttcatattttttgctttctgccttaaacaactccataattatcactccaatttagaactttatattatatatcatagtttatcttatttaataactccttatactttatgtcatttcaagggacaaaacttttttactattgattttataatctatttatatataattatttgtaggataaatttaatatcataggaggaacaggattatggaaccattatttttaaaacctatttttatggatagaatatggggtggtactgcacttaaagataaatttaattatgaaatagattcgccaacaactggtgaatgttgggctataagctctcataaaaatggagattgcttaatagaaaatggaaaatataaaggtaaaaaactatctgaattgtggaataaaaatagagaattatttggaaacacacctggtgataagtttcctttacttacaaaaatattggatgcaaatgataatttatcagttcaagtccatccaaatgatgaatatgctaagaaaaatgaaaatggagagttaggtaagacagagtgttggtatgtaatagattgttctgatgatgcagaaattataataggtcataatgcaaaatctcataaagaatttgtaaatatggtaaataataatgaatgggacaaactacttagaaaggttaatataaaaaagggagactttttctatgttccaagtggtactatacatgctatatgcaaaggaacattgattttagaaactcaacaaaactcagatactacttatagagtctatgattatgatagaactgacaattcaggtaataagcgtgaacttcatgttcaaaaatcaatagatgttacgaatgttcctcatataaatttcgatactgactataaaatcgtatcaacatcagactttaaatgcacaacatttgtgtcaaacgaattttttagtgtttataaattagatgtttttggaaaatgtaattttacacacaatacacctttttctttatacagtgtgttggatggaaatggaaaacttatacacaattctgtagaatataatttaaaaaagggtatgcattttatactgccaaacgactttggagattttagttttgaaggtaatttagagattatatgttctcacatatagatataaaacctagctaaaaataggctatcataataatttaccttatgatagcctatttcttacaacttaaatatttaaacaaatagtatttttattttatttttgctcataatcatttttaatagtatatatcagaaaattctatttttattttttcttgaatattatatattctcttatcttctgtgtaatgttcactactaaatcccttcattggaagtgaaattaagaactctgtgcctttattcacttcacttactacttctatatctccaccatgaagacttactagattcttaactatagcaagccctattccacttccttcagtatttctggataaagtcttatcaacttgtgaaaattcttcaaaaatcaattctaatttatcttgtggtattccaactccagtgtcttttacacttatgattactttatctattttataatgaatacttacatatatccagcctccattatcagtaaacttaatacagtttgacaatagattcaacataattctctcaatttcaaccttgtctatataaacattaatttcttcaaggtctgtatcaaaaagaatttttatgtcttttctaagtgcatactcttctatattcataaataagtcttctattacagatacaatattgtatttcgcaagttttagtgtatagaacccagactccatctttgttaaatctataatgttatttattaatctttgaagcctataagaactttgtctaactaaatccacatgagatttaatattgttattgtaatcttttatcttttcatttctatagaaagaatctaccagttgatttgaactagatataacatttagtggagtttttaattcatgagacatatttgcaaaaaactccgttttgattttatctgttttaaatctttcaagcagttctttttctgcttgctcggaatatttcttatgtactaaatcttttataataagcattatgtatctagtattgtatatagcaaaaggtaatgcacttaattctacttctactatatcatcataactatttatcaattcatattccagtaaaagtatacttctattttcatttaaaactttagccatattatccgtaaatttcattttttcttcagtattcgcattcattaatagtttaatattagaatcttttatatcatctatgtttgtaaaagctagcatatctaaaaacgacttatttgcatagtttatacttaaatcttcttttaataagcatatgccatcaggtaatatatctataaatcttgaatatgatgattgactttcctcaagttttatttgagatatttttcgagaggttgtatcacgtattacaataatagttttattagtaccagcattagtatactgagaaaaactcatctctacatactttacttcaccatctattacatatcttttttctatactttcttcacttttacatactaatgaaaaatcaatactctctaaattatttttaaaaatttccctacatgcattattaacatatattttgttattaccttcaagcactactatgccatctccaatactttctaaaaaatctttacttctcttatttgcttcaataagtttgcgttcgtactcctttttcttagtcttatcttctagtacacacaatactccttctgtttgtgaagcaataattaaaggtgcaaatatagcttgataaactttattatcgcttgtactaataagtttctctgcattcttctcatgaacaaacacataatgaatgctttctatcaaatcattgaagttttttattttatcagtcaatttatcttgttctttatagtctccaaaagtatttctaaagctcttatttgcatatgtaatttctccatctttgctaaacactactatgctatttactgctacatctaatgtagattgtagcctagattctcttttcataagtattcccttaagttcctctatcttttctgtctcatagattaattttttattcttttcttttaaactttccgttttttttgttaattcttcattcgtatcatgcaattccagtgctgttttcttaatattcttagatactatgtaattatataaataatataaggctacatttattattatctgtgataatatccgctctacatttctattatcaataactatatgcaatagatttggaactcttgataaaattattattactattattctgttaaaaatctttttttcatcatattcccatttacctttatttgaacttgaatttaattcaattccactaatgatagaaataattattatgaatatagatattataactcctaaagcatattgtgatttaccatttcccagatagtcacaaattcctgatattatgaataaagatgttattgttaatgtagcagttgctataaataaaattatacttgaataaatttgtttgttatccttaacaaatttaaaacttaagtatacacccagtataggaaataaatctgttattgctgatattgtgatgttaatctccattatagacttagttttaatccccaaggaattaaataaatatatacactccaatactccagtagctataaaaattaatcctaaaaatgtagaaaatgaatctactttaaattttgtagtattaaatataattactcctgtagctactaaaaatatcgtatatatggcatgtaataaagtttcatatttctctatatcttttataataaataataaaagtactgagcccattattataaataaaaggctcatgtcttctctttcttttatatctggttttacatcaggtattatattcttcaatactttacacttcctcttaattaatattttatactaattaattatacgatactcgacattataattccttctttataccttaaagcaaaaacagacattttctgctaaaacaaaattcttttgttttctactcttttagttattttgtttctatcgaagttttccaatataatcatgcaattctttctgctagaatcaatcaaatctctgtattctcctaatgttatttctttattttcttttatataatttatcaaaatgttctttgcattttcataaatatctttgtccattatatacaaatcatctaatttctctactttattacctatcattgactccaatacttcagcatagttatgatttccttcagaaacttcatctattgtcagtatagaagaaactccacatgattttaatcttttttctattttttttgctatttctttttgcttatcatttaaaataacctcaaaatctaatagagatactatattattttctatttttatagcattttctgtagacaatttttctaataaaatatccatctccctagtcttaaaattactctctatcttagaccttacttcttcttttagtatcccttttctaagcctatacttcttatggtactcacttaaaagctttattgtattttcttttaatttattgtattgatttatatgcatatacatatttcctataataaatactttatcttctgatataagtgcttcaagcgctctttttacatcttcttcatgagcaccactatagctcattatttcttttatatttggataattttttaaattcctttttaagtactcttctattatatcttttagttcgcctttttcttttatttttaatgcttctataactttttcatcaaatttcttatgttttttaggagatgggtcaattattacacctccacctatagtttccattggagaataacgtctcactacaaacgtatcacctttcttagatactatgctttcttcaagtctcaactgaacatagccactttctccactttcaattaattctttatctagtggaactgctctacaaagtatctctctagttccatgatacaatcttaatctatcccagtgctttaatcctttatctaaatgatttaccaatgataattttacatctaacatcattgattcctctaatgagtttggtgcagctaaaacatctcctctttttatatcatccacttttacatttgatatattgattgctgttctttgacctgcataagctgtatctttattttctccatgaacttgtatacttcttatttttgtttttaatacctgtggatatataactaaatcatcttctatacttatctttccttctattaaagtgcctgttattacagtaccaaacccttttattgaaaatactctgtctatattaagtcttgctggagagttttcatttttatcttctatatcatcactcattttatctattttttcaataagagtgtctatacctcttttagatatagaatcaacttcaattatttcagcatcttcaagaaaagttccttttattttttcacaaatatcttcttttactagctctctaaattcatcatctacagtatcagacttagttagaaccactattccatttttgatatttaaaaagcttagaatatctaaatgctcaactgtctgtggcataaccccttcatctgctgctacaacaagtaaaactatatcaattcctgatgctccagctaacatgttttttatgaatttttcgtgtcctgggacatcaacaattccagctcttctattgtttggtaaatcaaaataagtaaatcctaagtttattgaaatacctctctttttttcttcatctaatgtatcagtctctcttccagtcaatgcttttataagagtagtttttccgtggtcaatatgacctgctgttccaattactacatttttcattttttgccccctctaaacctgctatgactaaagtcacaagtgtgtgtagctattttttaatcaaaacttcatacttatacttctaaatttaatatttattagctcaaatttatttaattaaatgcttttctcaattccgcaactattacatcaaattcatcatcaaatatagttcttacatctagtacatatttattatcatacactctggctattatatgtgcttcactaagtcttagttttttttctaaagatgaaacattcatatgttcaggagttattgatattacctttgtacttatagtttcaagaggcatagaccctcctcccacttgtgaaaatccatcttctatatttatgtttgcatttaagtttaaagcagttattttttcaaatagtttatttgcttttacttctaattcttcaattttatatgtcaacatttttaaagtaggtatattttctatagcttttgtctcatctaaatacattctcaatgttgcttcaagagcacatattgtaagcttatcaactctaagtgctctagtaagttgatttttcttcattttttctatatactcttttttcccaactataatacctgcttgtggacctccaagcatcttatctccactaaaagttactacatctgcaccttgtcgaatagaatccaatacagttggttcataagataaaccgtattttgataaatctataaaaactccacttcctaagtcttctattacaggtagtttatattttttacctaaattaaccaattcttctatagaaacactctctgtgaatcccattattctataattacttgtatgaaccttcatcaatacatttgtatcttctgtaatggcctccttgtaatctttcaaatgagttttattagttgaaccaacttcaactaattctgcaccactaagagccattatacttggaatcctaaatgaaccacctacttcaactaattctccacgagatacaattgcttctcctcctttagccattgtgctaagtacaagaagtactgccgctgcattattatttacaactagtacatcttctgctccagtaagtctttttattgtactagttaaatgagagtatcttgaacctctttctccattatccaaatcgtattctaagtttgaataccttgaagcagcacaccataattcatcttttatatcttcactaagtaaagacctccctaaatttgtatgaataactgtaccagttgcatttataactttttttaaagataatgagtaatttaacttaactctctctattgcagattctattatttcaccaaactctattgttacagagtttgatgcatcttcttttaatcttaatataaattgtctttttaaatctattacttctctcacagattctaaaactaaacttctaggatattcatttattatttctacaattctattatcacttaatacttcatcaactgaaggcaacattgcaaacaattctcttttgctcaaaacaatcactctttctctataatattttataaaactgtaatatatttttccccttttggaactacagaacctataattttagcttctattgctccatttaatttcatatcttttacaagttcctctgcaagttcttcttttactgaaattaacaaccctcctgatgtttgtgggtcgtataaaatatcttgaactgcaacttctatatttcctacaacttctacatctttagatacataatgcatatttttatacataccagcaggtataattcccatttgtgccatttctattgcaccttcaataattggtacatgttttgattcaatttcaatacttacttcagaagctttggccatttctaaagtatgaccaagtagaccaaaaccagttatatctgtaaccgaatttacatcaaatttctcaaaactcattgctgcatatttatttaaatgtatcattatttctattactttatctgctatatgttgttctaccataccttctttcatggctgtatttaatacacccactccaattggttttgttataattaacttatcaccaggttttgcagtagcatttgataaaactttatttggacttacaatcccagaaactgaaagaccatatttaggctctttgtcatctacagtatgccctccaaccaaaagtgctccactttctttcactttatcaaacccaccttttaatatttccgcaagtacatccatatcatggcatgatggaaaacaaacaatattcatagcaaccaaaggtttgcctcccatagcatatacatctgatagtgaatttgatgcagcaatttgaccaaatacgtatgggttatctaccattggtgtaaagaagtctaaagtttggataagtgccatatcatcatttaatttataaactgcagcatcatctgctgtatctagtcctactaataaattttctatattatcatttttaggcaattgagataaaactgatgccagaacctctggccctattttagcggctcaaccacctgctgttgtcatctctgtaagttttttttgttcttttttcataaaagtgcctcctttactaaatttccacatgtacacacatatacatacatatttataataacatatctatatgtaagttttgtattatattttagtctacacaaattaaatcttttatattttcatactttttatctccaataccatttacattttttatttcctcaattgaactaaactgtccattttcttctctgtgttgtaaaattttattggctgtagcttctccaaccccaggtagagaatctaactcttctatagtcgctacatttatatttacttttgattcgttagatatatttttattggatttatttttaggctcacctcttgactcattcttctgatttggtttattggaatcatcattacttgtaacagatgttgcttcacctattttaggtattatgtaatgttgttcatcttctaatcttactgatagattgactccatttaaatctgcttcttttgtcgttcctcctagtaattctacagcatcataaagtctcttgtctgactctatagttacaattccaggtctatttactgctccacttatgtatatagttattttattattttgaaaatttttatctatgtctttagttactttattgtgattattatcttcacctttaatttcattctctacaacatgtgttttttcattaggtaaattttttttacttacaacataaatatcatctttgaaaataagcgatttataaacgattattgatgatattattaaaataaataaaacaaaaaacgaaataaattttaccttttttttcatatattaatcactcctttcttttaattattgacaaatatatgctatactaaaagatgaatttaaaatttggaggctcacaatgaaaagaaatttatcacttttattaatctgtttattgatatttacttcatttttaggaagctctaatatctcttttgcagataatgaaccagctatagttgctaaacatgcagttttaatggactatgagtctggcaaaatactatataataaggatggaaattctaagctttatccagcttcaacaactaaagtatggacagcttgtttagttctaaaggaggttaaagatttaaatcaagtaatagaaattaaagatttacctcaaatagatggctctagtatgtatctaaaaaatggggaatcttttactgtaaagcagttactagatgctcttttggttcattctgctaatgatgctgcttttgtattggctagatatgttggtggtggcaatgtacaaaaatttattgacctcatgaactctgaggcaaaaaaaattggagctactaatactcattttaataatcctcatggattaccagacccaaatcactacacaacagctcatgatatggctctcatagctagagaagctatgaataatgatacttttagacaaattgtaaaaactaagtcacttaaatttgaagctacaaaagcatatccttatgagagatactttgtaaacactaataagtttttgacatcacatgataagattacatacaaaggtcaacctataaatataaaatatgatatagttgatggtataaaaactggatatactgatgctgctggtaaatgtcttttatcgagtgctgtaaaagatggcagaagagttatcgttgctgtatttaattcaactaatgctgatttatatttagactcacgtattctgattgattatggatttgataactttaagtgtgctactattgttgataaagaaaaatacacagatactaaaaaagtattgtttacaaaacaacatgaattgatttatgaaccaaaaaatagttataggatattcttagaaaaagatgaatctcaaggcaattatgataccaaaacagagttaaataaaattgatttgcctataaaaaaaggagctaaggttggtactttaaatgtatataataatggtaaactagaaaacagtatagacttaattgcaaaaaataatcttgatagcagtcttccattttttactggaaataatattttaatgacttttgttaagattattgcaggtattctagtgcttttagttttatttataatagcttcaaatataaagaagaaaaaaagaaaaaaagctagaagtaaaaaaaatatgaaaaagtaacaagtagttggaaattataataaaaaatttataatatacttatccttataaatctaaaagtactgagataataattataactattatctcagtacttttaattttatgtttatgtattttttatacctatatatttttttgtttttgtttgtctttaagcttacattttgaacaatttcccagacattcatcaaccatatctagacattcattaaatgctaccttactactatttttatgccttacgattaatatatcttgttttttagcttgagactcaaccgttctagacatcttatgtgaaacagttgatgtaagtatgacaactgcatctggtcttcctatagaattatttaatttagatgacatggtagtatatacctttgtcttataaccttttttcttggccataaccatataatctttttccattctttcatgaccaccaatcactaataagttcattagatttcctcccatttatttgatattgattttcattattatttatattatatataatagtatttagaaataattttgtcaatacttattgatattaattatcattttaataataattttttatttgtatttattttaaatactactccttttaagtttcttacttttatataataaaatcttacacaataaaaagctgtaaatttaaatgataacattcaaatttacagcttttaaaaataaatacattattttaaattcttttttattcccttatttaatatactctcatagtcgataaaatcataaatatcttccttaaaagcatctgaaaacttatgtaattcttctaatgttaaatcttctattgcttttttattatcttcacaatatataacgatacttcctactataccatgtgcatctctaaaagcaacattatttttaaccaaataatccgcaacttctgttgcatttaaaaaaccattttttactgcttgtttcattttatcctcatttacctttagtgtggctatcattctatccattatttgtatacacatttcaagagtatgtacactatcgaaaaaaccttctttatcttcttgcatgtctttattatatgctaatggtattcctttcattactgtaaaaagaccaaataagtttccatatactctgccagtcttacctcttataagctctgcaccatctggatttttcttctgaggcattatactacttccagttgtatataaatcatctatctcaacaaatccaaattcttgagaactccaaagtatcaactcttcacttaatctacttaagtgcatcattataattgaaaaatcactcattagctctagtaaataatctctatcacttactccatccataaaattatctactacttttttaaatcctaattgttcacaagttatacttctatctatatcatgcgtagttcctgctaaagctccacagcctaaaggtgattcatctaatatttctatagcattttttattcttttctcatctctatcaaacatactataatatgccattaagtgatgcttaaatgtcactacttgagctctttgaagatgagtatagcctggcatcatcactgggtttttgtcagcaacatcttttatagtagctttaaattcagatattaaacccaccaaatcatttgctttttctttagcatacaatctcatatcaactgcaacttggtcatttctactacgtgctgtatgaagcttcttgccaacatctccaattctttgaattaaatttatctcagtaaaactatgtatatcttcatactctccatccaatactaactttccattttctacatcttcaagtatcccttttaaaccttctgttatagactttccttcttcttctgttaaaagtccacattttacttgcatatgaacatgtgctacacttccttcgatatcttttttgtacagtacacaatcatagccaaaagatttattaaattcttccataagttgattttccgcttttctaaagcgtccgccccataatttcataactttcacctcatattttaattttttgtattttaattataagtcttgtaactcaatgaaactaaaaaatctcttggtcaaaaagaccaagagacgaaatattccgtgttaccactctagttggtaaacaatgtttacccactctattctcttaaggcgagattacctactaccatactgaatttcaagtagtattctccaaagttcttttcaatataaagtgttatcattaggctcacaccatcccccaattcgctgagattttctctatatctactctctttttcactgaatctaaatttttatgttttatctatttgtattataattactatctacaaaatagtcaacctattttttcctattatatactgttttaagagctaagtgattcttttaactctaggaatttataaattgcctttgcaactccactgtcttgatttgtatctgtaacataatcagcttcttgtttaatcaattcttctgcatttcccatagctaccccaagaccagcaaactttatcatttctatgtcattgtaattgtctccaaatgcaattatatcttctctgtctatattcattttttcagctaaaattttaactgcattacctttatcaacaccttcattcatgacttcaatattgtttggccatgaagaagttatctttattccttgaacttttctcaattcttttcttatttcatccaaaatagatggatttttttcttctatgattacaaattttagtatatcttttttaaagatttcttctctcaaatcatcttttacaattacttctgtttcagagcctaaaaatacacttaatctatcttcacgtccttctatttttttcgaaagcatagaatctatactattacattggtagtaaatatcgtatttatctaatacatctaaaatgtttaaacatgttcttgtatcaatcttatttgaatatattatatttccattttgctctcttattaatgaaccattacaagctattattggcatgtcctctttaagaaaatctacattgcatttagctgaatcgaaggctcttcctgttgctaaagttacattaataccgctttttataactttttgtagtgcagttttattttcatctgtaactttatgattattgcctaataaagttccatccatatctgttacaattaatttatatcccataatccaactccataactttttattgtatacctatatttccttaatataatctaaagaattacccttattagattatatcataactttatacttaaactatttcaatttacaaaattaataacattcatttaacttattttaagagcaaaataaatcgtttcttgtagtatttttctgaatattttcaatttatagtcttataatgctagaaattttacaatatatgatatataatcatattaaataaagtgagctattataatatttatattcattttttactattatatattttcataatattttaaatctagcaacttttataacatttattattgactaaataaggagtgataaagtatgaaactaaaaattaacaaagctattgaaatgcagttgaaaaaaagttatgcaatagaatctggacattcagaagatgtattcgagatagactgtggtgaaggtataaataccgtgtcttactcaagcaaagctgtagaagcttttaatgctttaaaatttgatatgataagaggatatcctcattcaattgctttaaaagataatatagtcgattattggaaagattttatagcattagatactgacagaatttgtttggcagatggttctatacatgttatttaccttttaaatagactatttattgaaaagggagataaagttttaggatattcacctcagttctcagaatatgagacagatataaaaatgcatggtgcaacttatgattatgttcttttaaagaaagaggataatttcaagtttaatgaaaaagaatttattgaaaaaataaatccagaatataaagtaatttacatagacaatccaaacaatcctacaggacaaattatacctttatcatcaattgaaaatatagtaaaggaagcagctaaatatgatatagcagttatggtagatgaagcttatggtgaatacatgccaaaagaaaattcagctgtcaagcttctaaataattatgataatgtaattgctttaaaaacattttcaaaaggatttggtttagcaggactaagagcaggatatgcagttcttccagaacaacttgttagccctattaaaaagatttctactccttacgaagtgtctgaaatatctcgtagtattgcagcaaatttattagatgatgttcaatttatagaagaattaaaagaaaaaacaaaagatataaaaaatcaattactaattccatggaaaaaccttaatatagctgaaactagtgatactgtatcaattatgacagttgaacataaaaacaaggacatagatttacaacaagagtttgctaaattaaaaataagagttatatctggaagtgattttactggacttgataaaaatttcataagatttagaatgcctgaagaaaaagaattacctgaagttataaaagcattccaaataatcgataatatagaataaattagactatttataaaaggcatattgttaaaatcaatatgccctttaattttttgattattttacttcacttctatttattaatttgttaagttccattaatattgatgaaattaatgctaaccctaggcaaatccccaactggtacaatccaaacgttgttggtatagagaatattcctcttagcactggtattagtgttaaagagtaaagcccaagacagactaaaactgctcctataacgtatttattgctgaaaaaacctaattttattactgtttgattattagaacgtgcaggtaatgtttgcattattctagctaatatcaatgttgaaaatgccattgctactccaagttctggagatacttgtaatcctatatattgtgcaattattgtaactacacctattatacaacctcttatagcaactgccttcaatgttcctcctgctagtatactttcatccgggtgtctaggaggtttattcattatatttttttctgacttttcaaaccctaatgcaattgctggtaaagagtcatttactaagtttataaacaaaagttgtaaagctgtaaatggatttgaccaacctgcaaacactgcaaatactatggatactatagctcctaagtttcctgcaaatagataagtaattgattttattatattactgtatactgttctaccaacttcaacagcatttactatacttgcaaagttatcatcaaccaataccatagcagaagcatcttttgctacatcagtaccacttcccataccaattcctatatctgcttgttttaatgcaggtgcatcattaacaccatcaccagtcattgctgttatattattcttatgttgccatgcttttactatacgaattttattttctggcgagactctggcatatacacttatattttctagtttttcatatagttgttcttcactcaaagcatcaagctcttttccagtaagagccaagtctccttcttccattataccaatctcttttgcaattgctgctgctgttgttttatggtcaccagttatcataacagtttttataccagcactctttgcctcttttactgcatccattacttcttctcttggtgggtctatcattgccattattccaaccaatgtcatgtcatgttcgtcatcaattgaaggtataaaatcttcttctgggacatcttttattgcaaaagctaatactctaagtgctctatttgaaaactcttcatttttatgtttatattcttctattatctcatctgttatatctacttttgaaccatttttcaaagcatatttacatctactaaacacaatatctggagcaccttttgtaaacattatataatctccatatatactatttacagtagacataagctttctgtctgaatcaaatggtatttcatttattctgatatacttacttcttaatttatcataatctaaatcatttttacttgaataatttattaaagccacttctgttgggtcaccaacttctttaccatcactagttatatgagagtcattacacaatgtagaaaccatagtcaataatttagcatgataagaatagtttactttttctttatctaactcatcattattagttccatacatataataatcaactactgtcattttattttgtgtaagagtacctgttttatcagtacatattacacttgttgaacctaaagtttctactgctggtaattttcttattatggcttgtttttttgccatactatttgttccaacagccaatactatagtgactattgatgatagagcttctggtatagctgctactgctactgctacagagaacatgaatgaatctaaaataatttgtgtcatttctccatttccagccataaagtaatttcttgctacttgaattataaatattaaaagagcaagtattacaatacctacaccaagttttttactaaaatcctctattttttgttgcaatggtgtaagtttattttcagcactttctaaaagcccagctattttacccatctcagtatccatacctgttccagtcactacaaaagaacctctaccataaacaactacagcaccactaaataccatatttttctggtcacctaaacttacatcttcacttattttttctgtatgctttaaaactggttctgattctccagttaacatcccttctacaaccttgagagattgtgcttctataagccttccatctgctggtatgtaatcgccagcttctaagaatacaatatctccaactactagattttttgctggaattgtcatttttttattgtctcttattacctttgcgtttggtgcagataaatttttcaaactttctaatgaactttctgctttttttgtttgtacaacacccagaacagagtttataataataactgcaaaaattattatagactccactgtttcacctaaaaatatttgtactaaagcagctatcaatagaattattactaatgggtctttaaaactttctaggaaaagcttataagtaggaaccttatctgcttcttttaattcattagctccatttttttccaacaactcttctgctctttctttactcaaaccagataaacttgagtctaaatttttaattacttcttgataagtacttttgtaagacatttgttgccctcctcttcaataaatttattttatgtttgggggctcttatgtatacttgaaatttaaatttttttaaataaaaattccttgaataaaaaaagaccccaaaacaaacatacctaatgcttattttgaaggtcttgctatcaaggaatcccttgctaattaaccgagtatttctactgtcttgacgattaattaccactttcgtgtaagctactccccttcgagtagttatcttaaattgtatttacattatatcactttacacagctaatagtctaggttattttttattttaacctaattttaacaaaccatctcttaatttatatgtaaatattcttctaaagtcaaattattcattgcaaagtttttgctatgttcagttccaacatatctatagtgccaagattcatacatatatcctgttatattctctttaccttctggatatctaagtataaaaccatatttatatgcattttcatacaaccacttagcttcttttgtattgttgaactttttatttgcccaacaagactggtcatctcctccaatatcaaaagcaagtccagtttgatgctcactctctccaggtttagctgaaaatctatttgcttctttttctccatgttcttttacatatgatttaaataatctatcttgatattcataacttctatatgtactaaaagcttttaaatttaatcctgacttttgagcatctttattcattttataaaaagcatctctcgcttcactgctttcctgaggagaataatctttgggcaaactatattttttattcgctactataatattgtttattgataatacatttacgcctttcctgtatttacttaattcagctgtcataattttacttccttcgctagagctatcaataaacatttctacaaaaactataaatagagcaaaaattattgctacacaaattttctttttcatatactacacctccataattggaatttgatacagaaaaatttcaagacattctctttcatactataatcataccactaatttattgcaacttctttaaacaattcttaagaaactcttaagtttcttttttatacgactaaaaataacaacaaatttttcaaaaatttcatattacagtctatatattgattttttttccaaatgatgtataatatatttattaaaacttgtaggtactatatagtactaaacgtttttgcgtgaaaggagataataaagtgacagaaaaacaaaggctcattataaatattgcacaaaaaatttttgaccaaaaaggttttcaaaatacttcaatatcggatgttgtaaaagagtgtaaaatgtctaaagctactttttacaagcattttgaaactaaggaaagttttatctgcgaaataatcaattattatgatgaaaagtttttagaaattatacattccataaacgaaaataatgacattccatcatcagaaaagttaaacagaaagataattgctgtatggaaaaatattttttctagaactaccataaatacctatataagagaaaatttttctgaagagcaacgtaaggctacaagtaaattgcaaacaaaatcacgagctaacttattgaatgaatacaaattaagcttatttgataactatggtgataaaatagaaaaaattatatttgatttagttttcttattggatgctctaattcatcagtttatatacattattcatgtacaaaaaagagaaataaatgtatactttattgccaaatttactatacaaattctagatttagttgtagaaaatatggataatctaaatcctttaattgaaaaatcaatgtttttacataaacaagaagatgaagtttacttttcccttcataataaatcgctattttttaaaacgatacaagatatagaagaactaatcaaaactgatacttctctccttgaaaatcctaaattactagaagcaataaaaaaattatacgtcgagggaaaaaatcaacaatatgattctttaattatggatgcaatgattgcatatttagaaaaagaagacactttaagaccaaaagtacttttattgaacagcattaaaaatcaattaaaaaaggagacgttataaattatggaaacccaaagtaacaataaaaaaggaaatttaataatagcaattgtaatgactggtgcttttataagttctctcagtcaaacactattgtcaacagcattacctaatataatgtcagattttaaaattactgctgatattggtcagtggttaacaacaatttatctacttattgcaggtattattgtacccacaacagcttatttaataaatcgatttagtactagaaagttatttattacatcaatgtctatcttttctataggatgtattattgcacttttttctaataatttttcaactatgttgattgctcgtgtgttgcaggcaatgggttctggttctctaatgccacttttacaagttattatactctatttatgccctgaggaaaaacgtggtgcagctatgagtttagttggtattacagtaggatttgctccagcaataggtccaactttatcaggatggttagtagattcatttggttggcatagtttatttctgtttctttcccctattgctatattagatgttatactatcatttattctattaagaaatgttggggaaactcaaaaactaaagttagatataccttcaatagtactatcatctctaggttttggtggtttattaattggatttactaatcaaggtaattatgggtggactaatattgccacatatttaccaatattaataggaattatgtcattaattttatttacattgcgtcaattaaaatctaaagaaccttttttagaattgagggtttttaaaaataaaccatttcttatttctacaatattaattatgattgtatatgcctcaatgatgtctgctacattaatgattcctctgtacgttcaatctgtaagaggattttctgcattatcttcaggttcattaatgttacctggtgctatattgatggttgtactcaatccaattgcaggacgtcatttagataaatatggacctcatgctctatcaatattaggaacaggatgtttgtttttaggaactttatccttcgcttttttaggcagagatacatctttaattcatgtgtcattgatgtattgtattcgtatgattggtatttcaatggttttaatgccattaactacatggggaattaaaacattagatagagaacttatatctcatgccacagcaattaataacacactccgtcagatatctggagctataggttctgctatacttattactataatgacaagtgctactaagaaagctcatatgagttcaaacatgctgtctaacattcatggaatagatgttgcattttcaatagcagctactcttgcatttactggtttaattgtatctatatgttttataaaaagacatcaaattattagaagttaatacagaaaaggagttatcctatgaacaatttaagtttgctctatgataactcctttttattcattttaaccagtacagttttaattattctatatatttcctatatagttacctcttaaacactcattcgtttttatcaatataattgtttctagccttacatacattttttgtcattatttttctgataagatgtacatatatgaaattttttaattttgacatatgttgtgaatgagtagaaaaaaatacatctggtgatggaaaaataccataatcatacacgatagcttctttttggataaaagtatctttaccatcccaatcaatagatgtatttttcaaatcatttgtagctattgcatactttttaaacgttccaccatgattaaaaaacttcttctgaattgcttctaaatattttttatcagttatgacaccctccagagcaatccacctatcttgataaaatacctctacccaagtatgaagaatatattttggtgctaatagtgaaatcaatttggatgtagcacctcgttgaaaatcttttgttacatcaaaagcatgaagcctacaagggatattcactgcacgtaataatgccattaaaagagtagcttttgtattgcattgtcccataccatcatttaatacctgtgttgcgcttaacatatcagaagcattatatccaaataaaatatcattctgtacaaactcataaatagattttattttatgaaaatcatctaattccaaccaattctttgatgataccaaaagcttaagttgtggttcattataatttaacatttttgtttcctctaaatattctttattcataacaaagcccctttcttagtacaacttcattatataacgagaatatttaatatactttcaaaaattcgctatctttcaaagataaagaaacaggcattcccatcattcgcttaactgtccctgcaaagtgtgatggagtatcgaatccagcagtcatagaagcttcggtaacatttttcccagaaagtaattctctaaaagcacactccatttgatgaaataagatatagctttttaaaggtatccctatttgttctttaaacagatgtgataatctacttgctgatagggacactttatctgcaaaacttgaaatagtatgattatcacaattacaagtacgtaataaattgagcaattcagtaattctgtcatcataatgtttgagagttataggtatattcaaatagttattaagcatttccataaatcttaaatattgttctttactagagttatatatcaaaaaagttccttgttgacgtaatttctctaatccatcattgtcacatatccagtagccaaaatcattcatttttgaggtaagctgttctgcatatatagatgtaggttcaataatagcagagtaataaactttttttcttgctgaaaatgaatgagagatatttttatctactatgatacaattacatttaactaatttttcattgactgttatttcaatgctgtcttctatccctaagaacagttgtaacatgcagtggctatgtgtatctgcctctaaattatttgtaatcatgccaatcctatcttcttgccaaaaaattttatttataatgttcattgcatcaccccattcttctaaaaatatcactctttattttaatatattgccatatgtttgtgaatacattttgataaaagactctgaaaacatatctaattattaaataaaaaccctttcttttatcctactatcttaattctggccagtattccttattaacttctatcatttcatccaaaatttctttagcaacattcatacttggaatagttttatttaatgtgaatgcttgtaaagctttttcataactattttctatataagcttctactatcaatttttcactgttaagttgttgcatcattaatccttgttggaatagaggtattggacctcgagcaataacttctggaccatctttaccaatatatgctggaatttctaccattgcatcatatggcatgtttggtatagctccacgattttcagttataactaaaaaacgactacgtgtatcatttttaattgaaactgccaaatcactaatccaatctccatgtgaacctgcataaaatactttttcagaaatttctccagtttctaagtaatgtctcacaccttcaaataagtctttttcacggctttccataacctcatttgcacgagtacgatttatgtttgaatgttccactgtttctttacttaaaagatagtatgttaaataagtgtttggcagatattttgggaagctttctaacattgtataaacagattcccaaacatgtatccagctacttacagcatggcgatttcctgtactacgacttttatttaagttttctatataagattttggtaataatattttattttcttttatgtattccttaatctcttccattaagtctctatgtttataatctattgaagtaaaccagccaaaatgatttagaccaaaataatcatagcgtatattatgaacgtcattgatatttaatgactccgctatcatatctataatagctattggcatatcacagatatttataatccttgcatttggtcttaacttacgacaagcttcagaaacgattgcagcaggattagagtaatttaatatccaataatcttttttagcatatttctctacatcatcaataacctttatcattggttgtattgtacgcagtccgtatgccatccctccacaaccacaagtttcttgacctacacaaccatatttcaatggaattttttcatcctgctcacgcatttcatatttaccaacacgcatttgtgcaaatataaatgtagcatctgtatacgcttctttttcacaattagttacagttagtttaacatctgttttaacatcttcttttagtatccagttgacaactacagctactttatcttggcgttctttatcaatgtcaaataagcgaatttcctcaagctctaactctttttctcttaacgcaattgacttaacaatacctggagtaaatgtgcttcctccaccaacaatagtaataatcataataattattcctcctctataaattatatgtatctttaataaatagtaaacagcacttaaagctgttatttacccttgctatataaatatatatctttaataagcttctaaaaaatcttctactgcacgtcttacctcatgcacatgaagtccaaaaattatttgtatatcttttcctttccttacaatcccgctatttggcgttaaattaattatatcttcattaatcttactttcatcttttacattaacacgtaatctagtgatgcaattttctactgtattaatattttcttttccgcctaacccatcaattatattttctatacctgcatctaaattaagttgttttgattgttcttcgcctgtagctgtactctcatcttcacgacctggagttttataattaaatttcttaattaaaaaactaaatactacaaaatatacaataatttgtgcaagtcctaatatcatcattactggccagtgtgttttttctacacctactgtagtattcattataattgatactaataagttccctccacataatgcagtaacatcaaatatttttaataaagctataaaaagaccagctataactgcatgtacaaagaataaaagtggtgcacagaatacaaacataaagtctaatggttctgttacagaggctaatactgccgtaattattagtggaataatcgttgccttaactttcttcttattttgcttatatgcagtataaataaaggcagctcctatacctatataaccaaacatctttgtaaatccagttgccatgtagtatatactatctgagaaacgctcaactggtaaattcatttctgtcataactatagcataggctcctgaaactgtatctgcaccaactttaagcactcctcctaaatcagaaaactgaaatggtgtatagattaaatgatgaagtccagttggtactaatattctctctaaaaaaccatataagaataaaccaaatgtacctgtatctttgatgacatttgcaagagaagctattccttgttgagctaatggccatataaagttactcacaactccaattaaaatggatacaaagaacatgcatataaaactaaaatttgctcccgagtatatctgtaaagctcctttaaatgttttgttgcttgtacgattaaatacatatccagctatacaccctaaaataattccaccaaatacacttgtatctacaacttgaatacctaaaatagtagcttgtccagtccctatcagtccaagcatcttgctttcttttgctagttgacctagtgatgttaacatagtgttggaagctgtaaggtatattatataactcataaatcctattaacgctgctttgtgcttctctttttttgctagtgcagcaggaatacctatagcaaatataacagcaagattattaataatagccattatacagttataaattaggcttccaaatatttgaattggctcccatttaaaaaatggaagtactcctaataacatatcatttgtaagtagtacacctaccaccattaatattcctgcactcgataaatacattaatggctgaaccattgcctttgcaaatgtttccagtcctccaagtagtttttctttcaatcttatccccccctaaaattatatatttctattactaattcatctcattcttataagatttttgttaggtgtagtagtagataaattttttcaggtttatctaatttatacctaaactccttttcaatatatacatttaacttttctaaatattctttatttttaggatgattgttaattaaataatcatacatttcaatcattttatcatcctgacaaatttcattcttaaaaattctttgagcaagaaatttaagatgagttctaaaacgtaatgtacttaaactcgattcgtctaattctaatccataacattctttaatcaaatcaatactaccttttacaaattttaaagtatcatatgccaaattatcatttgattgtaaattgacaaaatgtaaagctatgtaacctgcttcatcttcaggcaaatggatatgacatactctatatataatttctaaagcttttactcctaattcaaactcttttgaatacatcatctttatatccaaaagcattaaattaggtaaaaaaacattatttttcattctatctattgcaaaactaatatgttccactaaagataatatccctttattattaaattttccctcatttcctggtataagacttataatttgttgtgaagcatccatcacttctggactaacattttttaataattctaaaaattttgtttgcatgtggtcttgaacataataaatcttttctattttatcttcattaactttatctcctggacgtttattaaaacctataccaagacctagtaaaatagcttctttcctatcattagttactgtagataatgcattattattaaagatttttactactctcatattgaattaatcccttcctattatttcataatttcaataacagtatcttgccctgcaacaacttcattttctaccatgcaatttatttctgaaaattcgctatgatttaatacaattattattgttgtacaatcaattccctgagaatttattttttctctttcaaaacttattattggactaccttttttaacagtatctccttgagacacttcatttttaaacccctcaccctgtaaattaactgtatcaattcctatgtggactaatatttcaacaccctcatctgagaccataccaaaggcatgctttgattctgtaagcacagttactttaccattacaaggggctacaacaacattactattaggaataattgcaactccatctcccattaacttttttgaaaacacagaatcgtttactttctcaatattaatgctgttaccactcactactgcatgtaacttatagcttttatttttcttgaaaaaatttaacacaatacttcctccttattaaatagatttttgaatttcaatacaaaaaaggcatgaatcctcaggataaaaatatccaagaactcatgcctaatttaatagttacacgtttcaaattatatactcattataaaaccttctcaaaaatattgcaatatttattttaattttattttttaattcgacaatatttatcatgttctttattgtgatttatttttttataaaaagactgaatcactagaatatagtttttcagccttttcaaattaaaaatattgtatttttataatacagctattacttctatttcaactttaacgtcttttggtaatctagcaacttctacacaagctcttgctggtttattttctccaaaatattcagcataaacttcgtttatagccccaaattcattcatatcttttataaatactgtagtcttaactacatttgaaaaatcagctccactttcagctaatatagctttaagattttttaaagattgagcagtttgagcttgtacatctccttcaactacttccatagtctctggtacaagaggaacttgtccagatacaaataataagtttccagcttttatagcttgagaatatggtcctaaagctgctggtgcatcattagtatgtattacttcatgtttcattttaaaatcctcctaattcgttaatctaatacacataaaatgtatcttcatacactattatactatttttcttgtatattatatacactttttattataattctataattttaaaacctttttcttctatagctttctttattctagctatatggtcataatctattgtctctaatataaattccgcactttgttttcctagagcttcccctgctgataatttaccttgattagcacttaaaatgtttccaccattctcacttattattctagttaactcagcaaagtttcctggcttatcttccataattgtactaaatgaatatcttcttccttctttagctaaagcaacacctattattctatataacgtatttatgtctatattaccaccagatattatacaaactacattttcatcttttgctggtacatacttaccacttaatatagcagctgtacatacagcaccagcaccttctgaaactattttttgactttccatcataaataatattgattctgcaatttctgtctcttcaaccactactatttcatcaaccaattcatttattatttcaaaagttaaatctcctggagttttaacagctataccatcagctattgtagtatcattaaatgctgttgttacttttccattttttattgactctttcattgaaggtatatttgcagtttgaacaccgactatttttacattaggatttaatgcttttgctgcaacagcaacaccagagatgattcctcctccaccaactgggcatagtatagtatcaactttattgtctaattgttcgaaaatttcaagagatatagttccttgtcctgctataacatacttatcattgaatggatgtaagaaagttgctcctgtttctttttgtatttcaacagcttttgcatatgcatcatcataaaccgcaccatttaaaactacttctgctccataacctttagttgcactaacttttgctaaaggcgcagttgctggcattactattgtagattttataccagtcatttttgctcccaatgcaactccttgagcatgattccctgcacttgaagctataactccatttgccttttcttcatctgttaaactcgctattttgttacaagctcctcttaatttaaaagaacctgttttttgaagattctcacatttatagaacacatttgctcctgttttttcgctaagtttaacactttcaagtaagtcagttctttttactatgttcttaatggtctctctagcctctttcacatctgttaaggtaacattcatcatttcattccactcccgtaaatccaatttttgtttattactttctatataattctatatcttttttttttaaaaatcaacatgtaaacgatttttataattttttaattaatcacaaaaaacctaaaaatacaacaattgcatacaataaacatatatcttcaattcatttaaattacattaaatgataatttaaaaatattttttacattcttattaaagcaataatatatactttattatttttattaaaatttatattttatattattttatttacccaaaatctatttttttgattttatttaacattattaagattaataaattaataaaatacatgtcttactaaacaacttcaatataaaagaaagttttactttatttttattcaaaattagaaaactatacatatataataaaatacaataaaaaaactaaggtgataattaaattgaatatttattttatataacaatcattttttattaaaaggtattttttattttaacatatatttaataaggctaaatagagttattattttaatttcatactttactttttctataaacctattataattaaagtataatcatttttgcaacttgtttattttattataaaaatgtgaaacttattacataaggaggaatttaacatgaaaaatcatacttataaagaaatcaaaaacatatatggaaaaataagcccttttgaatttaaggacaaattaatagatattgcaaaatacactgcaaaagaaaataacagagaattacttgatgcaggtcgtggaaatccaaactggacttgttcaactgctagagaagccttttttacttttggtcatttcgctattactgaaactcgttctaattgggatttaggtcatttggctggaatgcctcaaaaaaagggtattaaagaaagattttttaaatttataaatgaaaatatagatatgcctggagcatatttagctagagatattataaactttggtataaatgaacttggatttgatggagatgaatttgttcatgaactagctgatggaattattggtgataactatccacttccagatagaatgttacctcatatggaaaaaatagtacacgattacctagttcaagaaatgaaatatgatatatcaggtaaatatggtgatgtagaaatttttgctgttgaaggtgctacagctgctatgtgctatatatttgattcattaatggcaaatgaacttctaaaaaaaggagatacaatagccttaatgactccaatatttacaccttatcttgaaatacctaaccttcctcgttacgactttaaagtggtaaatataaatgctaatgaagttgatgaaaaaggtgctcatacatggcaatatacaaaaaaagaattagagaaacttcgtgacaaatctattaaagctttattcgttgttaatcctaataatcctgcttctatagctatggatgaaatatcttgtaataatctaatagatgtaattgaaaattataataaagatttaatgataatatcagatgatgtatatggaacttttgtagaagatttttcatccttaatgtcaaaactaccttacaacactgttggagtatattcttattcaaaatattttggagttacaggatggagacttggtacatttgcccttcataagaaaaatgtttttgataagaaaataaatgatttaactggagaattaaaaaaatcagtagataagcgttacagtgatatgagtcttaacccttctagtctttcatttatggaaagagttgttgctgatagcagacttgttgctctcaaccatactgctggtctttctactccacagcaagtacaaatggcgtttttctctgcttttgcattgattgacaaagtagatgcctacaaaaaactcaatatgagtatctgccatagacgtcaaaaactattatttgaagctttagagcttccaattaatgaaaacaaaaacaatgctgcatattacactcaatttgatattgaagaatgggctaaattaaactacggagaagacttatttaaatttataagtaaaactgcatctccagtagatgttctttataaattagctaatgactattcagtagttttacttagtggaaatggattctatggccctgaatggtcaattagaatatctctagcaaatctatatgatgaagcttatactaagataggaaaagccataagagagatattaaatggttatatcgttgaatggcaaaaaattaagaaataattatattacactgaaatatctaaattatatgaataaaagagtttatgtagaccttaactactttttttgatataatcctatcggaattataaattttatttatgaaaggcagagaatcgtatgagtattaagaaaaaagttgccatagtttttactggtggaactatatctatgacagtagatgataaagtcggagcagctataccaactttatcaggtgaacaaatactatcaatggttaccaacattgataaagttgcagatgttgaagtttttaattttgatgaaattccaggacctcacataacaccttatagaatgatggaattgaaaaattatgtaaatgatttattagcaagaaaagatattacaggtgttgtaataacacatggtacagatagtttagaggaaacagcttattttctagaccttacaattgacaacatcaaacctgtaatagtcacaggtgctatgagaagtagttctgaacttggatatgatggttcaagtaatttatctgcatcagtttgtactgcagtatccaaagatgctatgggaaaaggagtccttgtagttttaaacaatgaagtattattagcttctgaagctactaaaacaaatactctttctctaaatacatttaaatctctaactagtggtccattaggaataattgactgcaacgaacttgtccttacaagagatattgtaaatagaacaattatagatactgataaggtagaatctaaagttgccttatttaaagcatatgtaggagaaaatgctgactttataagatttgctgttgatagtggttataaaggtatagttattgaggcaatgggtataggtaatattcctcctcaaatgctttctggagttgaatatgctagagaaaaaggacttcctgtagttatagtttctagatgtcattcaggtagagtattcgatagttatggttactttggttctggtagagatttaaaaaatcttggttgtatatttggtggggacttgccaggtcaaaaagctagaataaaacttatcttagcacttggaaaaactgataaccttgatgaaatcaaagatttctttgaaaaaggaatctattgctaattctaataacttctatttaattatttagttcagtttacaagaaaatacacacaaaccataaaatgagatgttgacaacataacagacagtatgctcctgtaaaaggtaacatactatctgttatattgtctggattcccaaattagctatttggaacttaactaaaaaatcctaatataagggcaactattataatggcaatcggaatacatactgtgtaatcctgttccatagagtcatcatctgaatgtagttttacaattcgcaatttagcaatcagtttgaagcagaaatagcctattattgttccaattacattcgtgagtaagtcgtctatatcggttgctctgtgtaacgtaaaaagctgaatagtttcgataaagagagataatccaaaaccaatcaagaatgtatttctcaaccgttcaaaggttttgctgataagcggacataaaaaacctaatggaacaaaaagtaaaatattcaaaataaaactcaaactaaatccatcactaaaaggaataagatttatgtttggattaaagaacgtttcccctaactgtgacagtcttatatattcactgaatgtagggataccaacaatatgcgatagtgttaaacataagtagtaatacattgccagtgataaaatagatgtttttacctttggaatatcactatttttcttgaatattacaactaagaaaataccaatcaagataattcccaacaagaaaataggattaattaacaataaatctttgatagcttcaaacagactgagttgaatttctacacttgattgattatttgatacagtctccatttgtacacaccccctcataacatttcaattatttctaaaaaacaaaatagaagataaatcttaaaatcatcctatcaaaatttttaaatttgcctttatcagtttataccaccagttaattcctgtcttacttctgtatggtattcttgggattctttcatcaaattagacaaaaaaatggttaccatatcaataaactggttacgctccatatctcctgaagcaaacatcccctgagaataaatccgtatcaggaatctccacatctactgcacctatcacaagtcatttgataacatcctcaaacaatcccaacttggatatatcagcaacacccattagaatactactgctgaccatccttgttttcctggtgataattttaatcaactgggaagttgaaacgcctatcttttttgcaagttcctttttagaaacatggtagttattatatgaatctgaatctcgttgtctgggtgtttaagataaagcatagatacgcaccttttttgcctgttttcattatataaaaaaaattttaaaaatacaataattatatttttttcgtttaagcttagagcagttccttgatgaacaacactttagaaactgaataatttacataccacttaatacattaacacgatttaacattaattataataatatttaaaacaacaattagagtgtataagaatgaactttttagttctttaatcatttttttgtataaaatcaaatctatttttgtaatttcaacaatgaaaaaaggcttatctctattttgagacagcctcatttattttataaatttatatttttgttcatatttttgagttatttaacaactatatttactaattttttaggtacagctacaactttaactatagttttaccttcaactaatccttttattttttcatcttctaaagctaccttttccatctcatctttagatatatttgagttaacagttaattttcctctaacttttccattaacttgtacaacaacttctatttcatcttttactaaagctttttcgtcatatttaggccagtctatatcaaatacacttccttctttacctatcatagtccatagttcttcacctaaatgaggggcaaatggtgcaattatagttactatagtttgtacaccttcttttataactgcttcgtttatattatctaactctttatatttatacatatcatttattaattccataagagctgatatagcagtattaaatccgaatttttcacttaaatcagcagtaacttttttaagtgtagagtgtatagtatatctcatatccttatcttgggaatttaattctccaaactctacatcctttttaaccacatctgctaactcgtcaaccaatctataaaccctatttaagaatctaaagcatccatcaacaccttgctctgaccagtctaaatctctttctggtggtgctgcaaataatacgaaaagtcttgcagtatctgctccatactcatctattatatccataggagatactgtattccctttagacttactcattttagaaccatccataagtaccattccttgagtaagtaagtttttaaatggctcattgaagtctaccattcccatactcttaaatgcctttacaaaccatcttgcataaagcaaatgcattatagcatgttctactccacctatatattggtctactggatgccatctattaactaattccttactaaatggttcattttcattattgctatccacatatcttaagaaataccaagaagaatcaacgaatgtatccatagtatcaacttcccttctagctggttttccacagtgaggacaagttgttgacataaattgctttgaagtcgtaagtggagattctccctttccagtaaattcaacatctgttggtaaaagaactggtaaatcttcctttttaactggaactattccacattcatcacaataaaccacaggtataggacaaccccagtatctttgtcttgaaactaaccagtctctaagtctataattaattgttctctttcctctaccttctttttctaacttatcgattattccttcaaatccttctgaagcatctaatccattaaattcttctgaatttatcattttgttatcttctgttattacatcaattatgtctaaattatatttttcagcaaaatctctatctctttcatcatgtgctggaactgccattatagcacccgttccatactcaactaatacatagttagctatccatagaggaactttcttgccatttaaaggatttataacatatctacctataaacattccttctttttctacatcagctgctgttctttctatttctgtcatagtatgcattttttgaacaaaagcttcaacatctgcttcatattcagtccctgcaaccaattctttaactaattcatgctctggagcaagtaccatataagtaactccataagttgtgtctggtctagttgtaaatactgtcatagatttatcagttccatctatatcaaaaactaaatctgctcctgtacttttacctatccaatttttttgcattgttttaactttttctggccatccatctaatgtatctaagtcattaagtaattcttctgcaaattcagtagtcttaaaataccattgttctaaatctttctttaatactgttgctttacatctctcacatgctccttgaacaacttgctcatttgcaagaacagtctcacaagaaggacaccagttaacatatgattttttcttatatgcaagcccatgctctaaaaacttcaaaaatatttcttgtgtaaatctatagtattctggagttgaagttgcaacttctttatcccaatcataactaatacctaataaatttaattgctctttcatttcttctatattttccattgtccatttatgcggatgtattccatgttttatagctgcattttcagctggtaatccaaaagaatcccatcccattggatgaagtacattatatccttccatttttttgaatcttgcgacaacatcacctatagaataatttctaacatgtcccatgtgtatttttccagatggataagggaacatttctaatgtgtaataattaggtttttcagtttgtgcagtatccattttatactgattattatctttccaaattttttgccatttcgattctacttctttaaaattatatacgctcatattttgcctcctatttttaattgtgtataactaccttatttagtattatttacttataatttccaaataattctttgaaaataaaaaatcctcgtcactaaacttacgtttagggacgaggataaatcttcgcggtaccaccctaattagcctactacatatatagactctcttagatagcttttaatccagccatggagaatagattttaatctagtaagttcaaagttatataatattagttctcaccttccactaactctctgaaaaaatataatcttttactgctctagtctattcaatttaatataatttttgaaattttctaattataataacatatattatcatgtttatgctaatgtgtcaatatctatataaggtgcatctttccataatttttctaaattataaaaccctctattttcctcattaaatacatgaaccattatgtctccataatcaaggagtacccaagtttgagttccttgtccttctttacctcttggctctaatcctagttttgctaattcatcttccacattgtcagcaatagcttttacctgtctctgagaagatgctgtagtaataataaaataatcacacaaactagaaacttttcctatatttattataactgtatcttgacccagtttatcttctatggcatcatatgctatttttgtcatttgttccactgtcatataaaaattcctcactttcctaattaaaatacacttagttattgtaacatattaatacgattttgtaacatagtcaaatttaaatttattaatatgtttgcctttatatagcttttttataataacttttctttaattagatagtttcttgccataactgttcttggatgtatctcttcttttttattgatgacaaacattaaagtattattaaaagaagttaaaagtgcttcatcaagcttccctccatatgctaattctcttaatgtatctacaactggaaattttcttccttcttcaattaaatcagctatgtaaattattttttctaaaagagacatgtcctctctccctgttgtatgatatttgattgcatttataatatcttcatcttctacttcaaattcatactcgcatatgtacgccccaattacactatgagacaaggaacgatttccatcctctattgggtctaaatatatttcatacttatttacataatcctctatttccttgtcacttaaatactttgcacaatcatgaatcattcctgctaagtaagctttttctttgtcacatccataaatctcacataatttttcagcacattttgcaacatttcttgaatggctaagcctccccactggtagcatttgatttagtctttggttaatattttctaagttcatttaatcatctccatattgatatagtttattttcatataaataattttctacattttcgggtactaagtaacgtattgacttgccttcatttagctgttcccttatatatgtggacgatatatccagtgatggaacataaactgttataatgtcagcattatacttcttagttagtttttctatagtctcttgtgaccttaacaaactaattcctggtctagttgcggctataaaagtagctaactcaaagtttttctttacatctttccactcttcaacactacaaattgcatctgcacctgttataaaataaatgtctgcatttttgtattttttctttaagtattttaatgtatctattgtataagtccttttctttctttcgatttctacttttgaaactaaaaaatcttcgttgctttcagttgctagaagtgtcatattatatctatcatacttatctgtagtgatacataatttatgtggtggatttcctgatggtataaagattattttgtcaatgtcatacttgtctctaataaattctgctgttgctaaatgagcatagtgtatagggtcaaaagtacctcccaatatacctattttgattttgcctttatggcgattaaatttctctagtttttcagtatttttcaactctgccatcttaactagattttcacttctcatattttgtctccttttaatgttataatactattgtaccattattttttatttcttaaagcttataatttgtttttttgggtatataattatatttatatgctaaaaaacactttaaaaaataattatttaacatgattctgctttactttttaataaaaataactttttactattttgtcttaattttgataaaatataacatacaaatataagttttttgttaaattttattagttgcttttgttaatataattacatataaaaaaggaggacttatgggtataattacaaaaatagaacaacaaaaaagaaatgatgatagagttaatatttatgtagatgataaattttttattgctatatttaaagaacttgtttatacatttaatttaaaaaaagggaatgaaataaatgaagaagaattaaaacctattttagatgatgaaatgtatataaaagctaaaaataaagcattaaatattttatctcatgctgaccaatctgaaaaaaaattaaaagaaaaactatcatcagaatttgatgaaaatataattgagagggtcatagattttcttaaaagttataatctcgtaaatgacagtgtattagctcaaaaaattgttaacacaaatgttaacctaaataaatgtggcaaaaacagaattaagcagaatttatataataaaggtatcaatagaagtacaatcaatgaagcagtatctgaattagacaaggacactgaatttgaaaatgctatgtatctagcaaaaaaaaggtatgaaagagtaaagaaagaagataaaaagaaaatatatcaaaaaatttctcaacatctttcctataaaggctttgattatgatattattaaaagagttttaaacaaacttttaaattttgatgaatacgatatataagtataaatactagggaggtaaattatgaaattaatcattggtggcttaagctttttattaggattatataatatatatcaattatacagagaagatagtatgagataaatattattttttaaatgtaatatttattatggaggagaaatacaatgaaaagtcaaaaaagatttaaaattttagatattgatgtatacctacaaccatttgaatctgatataaaaaagcgaatgaaacattatgaggatatgaaatcaaaaacattgaaaaactataaagattttagttcttttgcaaatgctcatctttactatggatttcatcagacaaatgatggattcttctatagggaatgggctccaaatgcagatagtttgtcactaattggtgactttaataattggaatagaaaatctcatcctctaagaaaaattgggtctggtaattgggaaatatttattcctggtcaaaatagcttacctcacaaatcagaggtaaaggtacaagttactgcaaatggaaaaacatttgaccgtataccattatatataaaaagagtaattcaaaaagattttggtggatttaatggacaaatatggcaaccaaaaactccatttatctggactgacaataattttgacttaaaaaacataacttctccactaatctatgaatgtcatataggtatgtctactgaaagcgaatctattggaacttataatgaatttactgaaaaaatacttcctaagataaaaaaagctggatacaataccattcagcttatggctattatggaacatccatattatgcatcttttggataccaagtttcaaacttttatgcaatctcatctaggtttggtactcctgaagacttaaaaaacctcataaacactgctcattcaatggggattgctgttttattggatttagttcattctcatgctgtaaagaatactttagaaggaataaatgagtttgatggaagtgaacatcaatttttccactcaggttcaaagggaaatcatcctgcttggggtacaaaactttttaactatggtaaacctgaagtaatacattttttgctttcaaatataaaattttggttaaatgagtaccattttgatggctttaggtttgatggtgtgacttcaatgttatatcataaccatggtcttggagtttcatttgatagttatgaaaaatattttagtatgaatacagatattgaagctataacatatctccaatttgcaaatgaattaataaaagaaattaaacctaattcgataagtattgcagaagatatgagtggaatgcctggtatgtgtatccctataaaagacggcggaattggatttgactatagactcgcaatgggagtacctgatttttggataaaaactatctctaacttatctgatgaagactgggatttgggaaaaatgtggtatgaacttactactagacgacctggagaaaaaaatataggatattgtgaatcccatgaccaagcattagttggcgataaaacaattattttttggctagctgacaaggaaatgtactggaatatggaaataaactcaaataaccatgttatcaatagagcaatatctcttattaaattaattaaattaataactttttctctagcaggtgaaggatatctaaattttatgggaaatgaatttggacatcctgagtggattgattttccacgagaaggcaacaattggagctataagtatgccagaagacaatggagcctttcagaagataacaacttaaagtataaacaattattaaattttgataaatctatgctcgaacttacaaaatacagtgatatttttatccaaaatagtcatgaacttatacatatggataatgataaaaagattttggtgtacagtaagggcaaatatttatttatatttaatttccaccctaatctaatacaatcagttgatatttcaaagtttcaaaatacaaactacaaaacgatattaaatactgatatggtagagtttggaggaaacacaaaaaaagaaaacttaagagattatgatgtatactttagctcaactcctccttcttctaaaatgcctattgcctctcgtacagcaatagtacttttagataatggcatttaaatatgagccaaatatattaggaaactgcaaatgtagtccagtataaggcaaaaaaataaaataatgaaagcatggcaatatacctgttcaacatgctaaaaagacatattgacaaatcagtattaagccttttagctcccaaatatgacattattataatccacactctaacagtttgttggtttttctagtatataacactcatattaaagtaaacactaaaagccaaataacaatttaaatacaaaatgttatttggctaatttagtttgatactatttaactatcttttacattcagttctataatttccaacttttaatttgtggtattatattcatcttaacagtttgattctttaaagcttttctaaatttctcagttgaagaatctttaaacattttactagaagcactcttgaggtcttctatagattcccaatgttgtatcataatccacttttgagacttttcatcatataaaagctcagtatcaataaaaccagattgaatagaatgaaattttaattctaagtcatttacaatttctataaactcttcttttgataaattttcttccacattaaactcaactatttctgtaataattttcatatgtaaaacctccaatttattttcctatatcatatcaaaaaataaattggaggtattgtaaaaaatcgacagtataattataaatagttgtactttatattttctttaatcgtcttattctcaccaataaatttaattggtgacgtccctgaaaattttttaaattcttttataaagtgtgcttggtcatagtactcattttcataaataaaatcaaaaagttcattatctttataattataaataagttgactacttgccattttaaatctgtaaattctctttaaaatcttaggtgtataccctgtatattttaaacagattctttccaatgttttaatatttatatttgtattatcacaaaatgcttttatattgctatatctattatcatatataaatgaatttagaagctttacagatttatttgaaattaaatcttcttctaatatggataataacatttcttctaaatataaaacaattttttctactgattgtgttggatttaatgactcttccaattttttggcaaatagttctgatactgcttctaagtcaacaatttgtctgttaaactctgaaattggtatctttaaaaatggatagagaccaaatggataaaaagaaatccctataacacgtatatttccatgttgaataataaatccatgtttatcccttattccattaaaatgcatattactagcagtatagtcttgattttcaattttatattccataacatcagaaagattaagaataatatctatactgtctgtaggaagtaacttattatttaacagtatatttgattttgtttcaaaataccaaataaactttacccacggctttaaacgaacatttttgattgaatatcttgtaactgataacattgtgaactaacctctatactaaaattttttaattatgtactccatcttaatattatacagtataatttatgctatcataaattttagttcactttatatttattttatacattttttcaataccttagaaataggaagcgctattataagacctatcaatacttgcattaagttacctggtattgaagtaagaggtactataaaattaccataaagtataacttctgttatataatatccaaataacatccaaattgatgagacacatattcctattacattgattaaaaaattattcccattattaccatttgcccatgcaatctttccaagtaaataacccataactcctctaactataaaggtaaacggtgcccataaagtccacccagatattaaatcaaaaagtgacataccaatagctcctgataaagcaccttttttacttccaaatactattgctgatatgaacaacattgctgttcctaaatgcacaagcccaccatttatagatattggtaatcttatatttataaatttagttgcaataaatactaatgctattaatagtgaggtttccaccatgtctttcgttgtaaatttttgcttagctgtaacttccatactatatccccctatctattaaaaataatacttattaaataaattcaacaaattttcatttcctttgaatcctaatgcacttaaacttttatccaagacatttagtacatgctctattttatttagatttgcattctctcccatatgacctattcttaaaatagtatccatatattgatttagtgatgttgcaacaagtgtattataatttttaagcatataatcagtaagttttaaagctcctatactttcaggaatttttatagctgtgactgtattagaatatccttcttctaaaaatagttctagaccatattcctcaatagattttctaacactataagctatcttttcatgtctatctaatacattttctattccttcttctaatatattatcaagtgctttatcaagccccattatgtcacttattggcattgtataagggaagtattttttttcataatagccttcccatatatttaaattacaataaaaacctattacatcagtttttctattttttatacaattttttgcatcttgacttattccaactatagtaagtcctgctggtgcagaaatagctttttgtgaaccacctaatattatatctattttagattcatccacacttaatctttctcctaccatacctgctacagaatcaactacagttaatattccatattctttaagtaatggacatattttgcttacatcatttaatacgccagttggagtatcacaatgcactactgttgcatatttaaaattactatcctcatctaaaaatgctttcaattcatcaatatctatacttttagtatattcacttgaaaaaagcacatactccccaccatacattgttacaaaatctttaaaaccttctccatatataccattgtcaattacaagtactctatctcctttttcggtaagtgatgcacatgctgcttcaagccctaatattccttcaccactcaatatgtaaacatcgttttttgttccaactatattgccaaacttctcgcatgtctttttataaaattcaacaaaatcaatatctatatctggatttgttgttttttctgctcttgctaatcttacattttccctagtttcagttggtcctggtgcataattaatcttcttattcatatatatcagctcctatttattttctatacgattattatacaaaattttcattttatatggtacaattttatacttttttagaattgtaccgatacattttctaacatgaataatatcagtatattagatatattattgattacataataaaatacagagcaaacatccgtttaaattgtttgctctgtactatgctttaacctatttaattatgaatctctttaactatattttttatatgctttttgctagttaaactaaccacaaatatttgcattttattcactgtatcttactctatcaataagagattctttattaaaacttcgtcctatcaaataagttgttataaattgagctataagaatacacacaatcatcaacaagattggtactattggcaaagaatatgttgcataagataatccagtcttttttagaaatataacagcaatataccctaatatacctccaaataaaatacttcctatcatcattccagaagtgtaatacattgcctctgaattaagcattttcactaattgtttattagtaagaccaatagcttgaagcataccaagttctttttttctagtaactatgctagttatcattgtgttgacaagattcataaatccaatcacacctattatgcctgttagcgtgtatcccattatctttataaatgaaataacagccttatttgactcaattctactatctataaaatcagtctctaaaaatccattatttttagcaatcttcttgatactatctttgatttcttgatactttccttcttctgtatatattcccaagctactagttgaatcgtattttaaagttctatcaataaaatccttccctataccaaaacttggaacccccatagctattgcttgaactttaaattctttttttatctttttatctccatcatataaagttaatcttattttatctcctgcttttactcccatttcttttgctgtatcaacatgagtaattactatttcatctccagtttgcagtctttcaagatttatttttccatctattagattcttgtttaatgattttacatcattttcatttatactttgtaaaaggtcatacttaaattcaacatcatagtcctccataccaatttttacacttcttgcagattctattcttttaattccttccatgttctttatttgattaaaaaaatctttacttagaggattatccatttgtaaaatattcaaattatttttaggatttttatcactgttcatttcataaccagatagtctaacttctatatcataaggaaagtgttctcttgccattttctcagcatcaaaactttctaaagcagttgatactgttataaatatagttccactaagtataagtgatgccaatgtcatgtaagtacgttttttatttctttctaaattggcatgtgataatctctttagatttatatttttatatccttttctcttactcttattacttattttatttcctgtatatcttactgcgtcaacaatggatacttttgatgctactttcattggttttaaaagtgataaaacaacagatataaagcttattaccacaaccgataatataactggtaatcgtgatgattttacatctatatccataaatgattttattataatatttgcaagtacatagcctaaaattattcctattggtattgctattccggctaatataaacccttccttaaacactatattttttatttgtttcttagttgcaccaattgctctaagttttccaaattcttgaacttttgtaactattgaaatataaaatatattgtatattactaaaatactagataatacaattactaatcctacaaaacctccacccataatcgtttccatatctggttttaaagcatttatataattttcatttacagcagtattaatagtatcaagtcctatatcattagcaattttatctaatttttcttttgcttgctctattgataaattacttttatcattaaattttacataaatattaaaatcttcttgtgacatatctctagtatttctcatatataattctgatataatagcataataatatttacctgcttcagatatttcgctagtttttaagattccacttataacgaactctttttcaatttttttatcatttttatagtcattataagatatttttatcttttcacctaagtctttatttttataaccaagtgcctttaaagctccactatctaacacaatttcattctcttttgttggcaattttcctttgataagttcaaaactatttaatttcaaagcatcttcattcatgtatgctagagaaatatttgaatcatcttccagtttttcaacacctactccattcatttcaccagttaattcaacatctgcatgattactcaatatatcagcctgtttttcatctacatttgctaatataccttgataattacctgaatactttatagtattttctttttgatatgctcctgcatcaacaatataaattccaatagaagaaagcattaaagtagaaagtattatagtgattattattagaatactttttgatttattttgttttaaattactttttgctattttagtagtattaatcatttttatcaccaacctttgacaccctgccatcttctatgaatataactctatcagccatttgggctatactgtcatcatgagttatcataactagagtttgactgtacttcttagacatagattttaatatactcataacctcatcagatgttttagaatctaggtttccagttggttcatcagcaagtattatagctggtcttgtagctaatgctcttgctattgccaccctttgttgttgaccacctgataatgtatttggtaaaacgtcatgtttattttcaagtcctaatgatttcaaaagttcttttataaaagattcatctacttctctaccatctagaccgattggcaacactacattttcccatacattaagagatggaattaaattatagctttgaaatataaaccctatttttcttcttctaaacacagctagttcttcttcttttaatgtaaatatatttttattatctatatacaccttcccagatgtaggtatatcaagacctccaatcatatgtaaaagtgtactttttccagaacctgattttcctattattgcaacaaattcaccttcatttatttctaagttaacattgtccaaagctcttactaagttttctccttttccataatgctttgataaattttcagtatatagtattttcataaaattatcccctcattctaagttatattaccccatattttattaattttttatttctggagctgtttatacttatataataaatgtagaggcttacattttcctttcatttaatattacatagttgtaagaaacaaagaaaacttactccctatccctacttttgaagaaactataatatttccaccttgttcttctaaaatctttctacttaaatacaatcctaccccactaccttctacagattcaatttcatcagcagaacctctataaaaacgtttaaatatattattaaactcatttttttcaatccctatgccattatcctctattataattttaaagaaattagcagtttcttctacagatatatttatttctccatttacctgtgtgtactttacagcattatctaatacattaaaaatactctcctcagtccactttttatcatgtggtataattctactgttaaattcatttaaatttaatgttatacttttgctcttagccttaggggtaacactttttactgcatttagaatagtattttttatatcattatcttctttttttatgtttatcatgctaatttctaaccttgatatgttcactaaagaatttattaaattttctaatttatttatagaagccttattggttaataagaactcgttggcttcatcttcttctaatttttcttctataagtaatgtattgtataattttaaggatgctaaaggagtttttaattgatgagaaatatctgttactaatgattttacactttctttttctttttctaatttaataaactttatctttaaacttctattaagctcatatagacagttatttatcttactaaatgtaccttctttaaaatactcattatattctactagataaccagtttcttctgactcagtagtgtccttcaagtagttttcttgtgccatcttatctactataaaataaattttactcaatcttttatttatgtatcttataaaataatatattatacctataactactataaacatcattaaaaaaataaaaaatgattccttaaaaaaagattttaagtataaactaaaatttttatcatttgacattttattttccaatccatagccaaatttcttaaatgccttttctccagtagacaccttactataatcggaattataaatagaatttactatatctatttcatcattaggatatttttcaatcaatattccagcaatattttgagtattttttatttgatgttcatacaatttatgtaatctgctatattcaaaaagtataaatacaagggttactattagtacagataaaacagaatatacaataactcttctcattatataatcatctttcacacttaaaccatctttgaggttcatattttttagcatttttttatactcctttctccccacatatatccaacccctcttactgtttttatatatttaggttcagatggatttttttcaaccttttgtctaagtcttcttatatttactgcaatcgtattatcatctacaaaattaccactactatcccataaagattctaacagttgttctttagtcaatgtctgcatagaattttccatcaaatattttaatagttttgtctctgtcttacttaaaattatctcttcttccttatcatctgttcttataattaatttattttctatataataaaagaataaatcatcacaaactaatagagtataattttttactgtatttactcttttcataagcgcattcacttttgatattaataccatcaagctaaaaggctttgtgatataatcatctgcacctaaatcatatcctgtgacaatatccacctcttcatcaagagctgtcaacattattatgtaaacatcacttttctttctaatctcctcacaaaagtcaaaaccactaccatcaggtagacctatatcggaaataattaagcatatctcttcttttgcgaaaatattttttgcttcttctataccaaatgcactaaaaacattgtatccttctttttttaatttaaaactaattcctctatttaaagatttgtcatcttccaaaagtaatatattattcatccctatatcctccatcatcatatatactagctaaattatatcatactaataaaatcatttttttatcaatttgtaaatatatcagaagttgttaatatgatttcatttacttgaataaaaactaaaaatccccataatactatgccatttagtgtaattatttttcataaaatacaattttatttaaaaataatcatgttaaagcataaaacaaaggaaattagtatttatataactaatttcctttgctgtttactattatctaaaattaaattactatctactaattttgctcattaatttttattttgactttttatcctttaactctttttgattaaaattcaataaacatatcaatgtacttgaaactataaatataattatactatttgaaaaacctaaatctcctgttttaggagatttttctttagcttctcttttagatattccttgattagaactttctctagcacttgttttatctaagcttttatttttgtcactatcagagctttttatattattagatagattctcttcattatcattgatatttttttcattttcacttaatatcaaatcactctcatgattcttgcttattaactcatctttagatttaataccaattcttccatctacattttttgatatttcttttttgtactctatatattcaatgactgcactctctaaatttccaaattcctttagtattggctcttttgaaaaacaaggaaattcatctccacctgaggctatataatcattcgttgcaactacatactttttatttaaatctaatggctttccttctttttgaatacttgttattctttcgccttctttttgtttaggattaaagtagtatgaaattcctcccacttgcaaaaaggctgaacttttttctggataaagttttactccatgctccaatacatctttaatctgtgctcctgtaagttctttggtaactatagtattgctaaaaggaaatacatctacaatatctcttcttgttatattgcctttttctatcgtatctcgaatattccctccattaaataaagaaatatcagccttagttttatctagtaaaatgtcacttattaaattacccaaattagtttcttttgtccttacattttcatatgaaccatctagagtatttgtagttgcacctataactttatctaatattttttcttgttgttcttttatttcatcaacctttttacttacaacgtagtcaagcttatactttaatgcttcttcttttccaattaatctaactgatttattttctatttttatattttctacatcattagtatccaaagttagttttatctcgccaatattttctaaatattgtcctgcacttacaatcaatgtatcacccacttgtttaccattttcaaacttagtgtggctgtgtccatcaataatcaaatcaattccttgaacctcatttgctatatctatactatttggcttacttaaactatttgtaccaatatgacatattgcaactattacattggcaccttttccttttaattcatttacttgttctgttgcactttctataggatttttaaactctaatccttccacatttttaaatccagttttgttctttgtttcctgggttgagagtccaaaaaatcctatttttattccatctatttcttttatatcattactatcaaaaactttttttccattttcaaaaatatttgatgataaaaattttaaagtattctctcctaaattagcacttttagataactcaaacagtctatcttttccataattaaagtcatgatttccaggagtaatatagtcatatccagcacatttaattaattcaattgcacttttccctctatccatatttactattggaagtccatgcaaacaatctcctgcatctactaaaattgagtttggagtttcttttttcaatgtggctagatttcctatttgtatatggtcatcaccttcagcatatcttccatgtatatcattagtgtgaaaaatggttatttcttcaaatcgctctagcccataagaaataaaactctgacttgttgtaattagaattataattaccaaaattaaataccttctaatcttcaatataaattagcctcctcaaattagttttagctttaatataaaatttatattttacataaaactttttagataaatattaaactatagtaagattgattagtgtaatttttaatatttatctatcaatttaattttgtccatatccaattagttttaatctaattacattttttcacatctatatttttcttttattatataaaattattattttaaaatcttttcaactggtctcttttaaaagtccattgaggtattgtcaaatcaccttcaaaatctaaactataccaaggactcaaatttggatttttacgattaataagaagttgcgtttgttgtgcaggcatatagctttgggctatcataaatacctttttaccagtcttttcattttctgccatatccataattatacttgcatgtcctggacttccaccaactataaacacatctcctattttcatatcctcaacttttacaggctccaattctttttcaagagataacgttcctgaatatgcaaacactatatccataaactttctgaaactctcataagatgttgaatattcagttgctttataccagcttgaaccactatcttttactgaaattctatatccttgtgcccattttgaatacttcgccttaaaaccatcaacaaaatcaaaacttatttcatcatatagtttattctgatacaagtattctgctctcataagcataatcgcatctgcacattgatgcaaatctctattgccaatatcaacatcaaatacactatcataaataccttttgattccttaattcttccatcataatactttactttctctccataattttttagcttagtattcctaagaaatgattcaaaactacctttttctacatcaactcttttaaatccttttggtggctcatacctatctttcaatatatttgcatctttatgtactattataggctgttcatcttttttagaattttgaattttcttagaaccttcaaccacttttttatcttctccgttactacaaccaactaaggttaatgtaatcaatgacaaaatagtaattttctttaatactttcattaaattttcctcctttaaatactcctaaatataattttcacttttcgttctccaaatttttatacattgctatataaaaactttatttgataatatttcttgactcaaatacacatttattgttatatttaatgttaaaataattataataggatatcataataaaaacaaacaacagatttgtgttaattttagaaaggggaaaaaatgatagatttaactttacttggatgtggtggaaatgtacctatgccaaacagatttctatcctctgtatttataaactataaaggtagaaaaatactaattgactgtggtgaaggtactcaggtatctatgaagctaaaaaaatgtggctttaaagatatagacttgatttgtataacccatttacatggtgaccatatatttggacttttaggacttttatcaacaattgggaatagtggtcgtacaagtgatttaactatagttggtccagttggaatagtcgattgtatacgttctatgagaaatttagtagaatatgtaccatacactttaaaaattatagaaaaccctcaaggcaatttttctttagataataaagttttaagaaatttagaaatttcaacaatcagtttagaacactctatagagtgtttaggatacagttttaattttagaagaaaccctaaatttgatatagataaggcaactaaaaacgaagttcctaaaatattatggaacaaactccaagaaggtcaaaatatagttttaaattcaaaacaatacactccagatatggtcttaggagaattgagaaagggagttaagataagtcttacaaccgatacaagacctatagaatcaataccagatttcataaaagatagtgatttatttatatgtgaagccatgtatggtgatgatttagatatatcaaaagctgttagaaacaaacatatgacttttagagaagctgctaatcttgcaaaacttggaaatgtcaaacaacttttactgacccattttagtccttctttagacatacctagtatgtatttagaaaatgctactaatgtttttgaaaatactattcttggagaagatagattaagcttgcgtttaaattttgatgaataatttaatggaatccttatttctaaaaatttggaataaaaatttagggatgaattttaccatgataaaaatagtttaggtaaattcattcccttaattgcttgtcaactatattagctataatctaaatattatttagacacatttccagctacatttaaaacatcccatgttcttgcaaatggtggggcataacataaatctaacattccaagttgacttgtggtcatttttccaaagatagcagctgccaatacatttgctctttggacagcatccttaaacccagccacttgtccgcctaaaataacttttgtatctgcatcataaataagttttacatatattttatttcttcctggataataatgagtttgattataatcagaaataaatttagatttgacatttatgcctaaatctttagcttgcttttctgtaattccagttgatgctgcctccatatccataatttttatacaacttgaagatagtgaaccttgataagatacttctcttcctgctaggttttctcctactatcctacctaatttattagctccagtagctaaaggaacatatacattttcattacttactatattctttatagttgcacaatctccagcagagtatatatcttctacagaagttcttccatattcatcaactactatagctccattttttagcatttttatattagtatttgacaaaaactcggtattaggtctcacaccagtagcaattattactacatctgtatctatttcccctttgtttgttataactttttctactttatcttctccacaaagttctacaaccatttcatccaagtgcaaattaacattatgtctatttatttcttcttctaatacatccgtcatctccttatcaaatacttgtggcaatattctatcttctaactgaattacatctacatctttacctaatttcttacatgcctcaactgcttctaaccctataaaaccagctcctattattgtcactcttttattatcttcattacttaaaagtttttttagatattctccatcatataaactttttaatgtagaaacattcttcaattttatgttttttataggaggcataatacttcttgctccagttgctatcatcaatttatcatagtaatcttcatatatttcatctgtttttatattttttacttttattttcttagattcactatcaacctcaacgacttctctaaatatatttaaatcaattccagcttctctaagtttctctggtgttcttgctaataattcatcagcatcatcaaaaaaaccaccaacaaagtatggtaatccacaagcaccaaaagatactatttcagttttttcataaacaacaacttcatactcaggttttattctttttaattttgctgcagcactcataccagctgcaacaccaccaattattactactctcattttatctctcctttgatgtctagttaatttcttcacttattttaagcttttcatttgatatatattctatgtaaacatttttcataacaatttttagttatttatttaacatattttaatttgaaatcaaatattataaaagctattttttattttcttaccacaattcaaattctttaaacatttattataccctatttttctatacttaatcacatttttcaaaatcaatttattttactctatttaagtaaattgtgatataatattgacatttttttaatatattggtatcatttaaacttagaaaaatttatttttaaataaaaggagaaaaaatattggaaagttcatttttatcacaatttcttatgattacagattttaaaacgatttttttcataatattacttctaggtacattctttattgttagacaatttgaaaagaaaaaaataaaattttcattgagaacaatatatgctacagtactaggactcatattgggaatcataatacaagcttttgctggttttcctaatgataccactcaagtcacttggctacaagaagtaagcaagtggtatagcctatttggttctggatttatggacttattaaaaatgttagtagtacctttagttttcttatccattataaaagtaattataaatatgaaagataacaatcttggaactctgacatttaaatctttaggtatgcttcttgctactactgctatagctgcaattgttggaattatcgttgcaaatataatgaagttaggtgtaggagctaatatgcctactttagttgaaaatcaagaacttaaagaaataaactctcttgtggatactttaagaggattactaccatctaatcctgtaatggctatggcaaatggaaatattgtagctacaataatatttgctacatttatagctacctcaataaagagattaagtaaaaaacactttgaaacaataaaaccatttatagattttatagaagcatcttacaaaataattgtaagtgtgtctatgactgttattaaatttatgccttatgctgtggttgctctgcttgcaaatacaataacttcacaaggtattagctcaatagtatctgttttacagtttatattagctctttatatatcagtggcaatattatttaccatacatttaatttttataactttaaatggtctaaatcccattacttatataagaaattcaactgaagctttacttctggcatttacttcacgttctagtttaggaacattgcctgtaacgatagaaagtctagtacaaaatcacggagttgatgagggtgtatcaagctttacagcaagtttaggtgcaaatatgggtatgaatggttgtgcaggtatatatcctgctttaatggctgtaacacttgccaatatggctggagtaaacatggatatgagcctttatgttatgttgttaattgttataacaattagttcgtttggaatagctggtcttccaggaactgctacaatggccgtttcagttgttatctctggagttggtcttggttcttattttccattagttggtggtatacttgcaatagaccctatactagatatgggacgtaccatgataaatgttaatggtgctatggtatcatcaattactgtaggaaaatcacttggaaaaatagataaagaagtatttggtaaaaaaaacatttcttagagtaacacttaagataaatggctaacttttaactagttagccatttattttttattttataagaaaatttctttagaaatttacttacaaaacggaaaaaattcttttgtaagattttggggatatacagatataaaaacaaagtcatagtcatgggattttgcatattctagtatatctccatcataatatctagggtctatcatatctatagatgaacaaacagaggaaaaaaatgctgctgttggtacaattagagaatctttaacaaacagcacttttaatccatctggattttctatattttttattttaactaatggtctattccccaataaatatgtaaaatacttatctgattgaccatccattaaatcaaggtctgcattaaaaggatatgataatattaaactctcttcaaaccttccttttaattcaaatttttgagatttagaatctgtataataagtataattagtcttaaatttaggataaattaatgtaaaatcatctataccaccatataagataccagtctttcttcccatagaaccaagaaatgacttaggatatacaattgagttataattttctttatctctatagtaatgattttcatctaaattcatattgtattttttattaagttgctcaactaattctccaaatgcccaaaaagaagtttctactttccagtgatggtctgttttaaaaaataaatcatcttttggaataccactctttaaaatattttctctaaaatcaatatagtccacattatacttttttagttgatttaaaaaattatctgctgtctcattgctataagaataaggtattccttttggaaattttgtcactccttttatatacttatctggagtcattaagtaaactaatttagtgttttgcttttccatttcctcagaaaattttcttaccctatctgctatcacaccaactggatttggagctttagcaaaatatgtataatgcatctttccagaagtatcttttacaacactaaattttgaaaactcatttttacccattaacttttgtaagtagccataagtttcaatgaacgtatttttatatattactttgtcatttactgtgttatcaatagatgatattgtatcttttaaactacttttttcagcaactgaattttttatctcctgtatcatatcttttccagaataacaaatattaaagatagagaaagcgaataaaataattaagaacataattgcagttattaatcttactttaaaaaatctattcatacttttcctcccaactaaaaattaaaataaataaatggattatagcttccagttactaaatatgtcacagaaataaagaacaataaaatagctgagattggataaaatacgttaaatatcatactatatttagcttgttcaacaacaaacttattgattttctttgcaataggtacactaaaaataaatgcaaatataaagaaaacccagtattcttttaaaaacatatatgtataatcactccatataactccattgcctccaagcatagctttgaaataattatatgcttcttttaaattaggtgacctaaacaatacccacccaaagttaactactaataacgcataaatatgttttataaaattgtgattttcaatcttttcaaacattataaatcgctctataatcaagaaaacaaagtttaaaatcccccaaattacaaatgtccattctgctccatgccatattccagtaaataaccacactataaacatatttctaatcataatatctttatttgctactctagaacctccaagcggaaagtatatatagctcttaaaccacattcccaaagaaatgtgccatcttctccaaaactcactaattgattttgatatatatggataattaaagttctcttcaaatttaaaaccaaacataagacctaaacctatagccatatctgaataagcagaaaaatcaaagaatatttgcatagtataggctattgaaccaagccatgcaagtgatgcagctatttctccttgactattcatagtgtaaatatagtctgctactatagccatgttatttgaaattaatacttttttgcctagacctgttataaacctgcaagtcccaatagaaaatttattccaagtttcttttctattgagaatttgttctgccacactctcatatctaactataggacctgctattaattgtgggaaaaatgctatatacagtcccacataaaaaggattcttttggacttctccatgtctacgatatacatctataacataagacattccctgaaatgtaaaaaatgaaattcctataggtaaaacaatactaggtatagttagttcagtattaataagttcactaatatttcttagcgcaaaagctagatatttaaatataaataaaacacctatattatatacacacatcaaaactaaaaaaacttttacttttattttactttccctatatctatctactagtaaaccaaatatatagttcattattatggaaactatcatgataacaacaaattttggctctccccaagcataaaaaaataaactaacagcaagcaatatcatgttctgtatcgttcggttaaacctaaatacataatataaaaccaaagttataggtaaaaaataaaataaaaaaattaaacttgaaaataacacaatctaacctcctctctttacttagtttttgaacattttttccaatataaatatattccaaagcatattattactagagatacaaataaaattcgaacaaacgttatgatgttattcataaagtttatttttttcatatattgtactgttggtgattgctcaggagataccaatgtatatggaacaccatccttatcttttttattaatactccaagattcagttaatgctattttccttccaattttaaacttatcatcaacattaacttgtaaaataatttgtccaggttcggctttattacttaatgttaatttaccattttgagatatgctcacattatcttgttttcccataagagaatacttaattttagaatcacgtttaagacctaatacctcatactgacttatactttgacccaatactggtatttgtacttcttcattgccagttattttaatattatgtaaaaaacttaatttctcttcagacaataaagatatcttttttataataacaatattatgttcttcatcagatggaataaatgtaattccccaactaacaatgtttgaaagcatacttgagtccagcacaacattacttttctcatttataaggctattaaagttcacataaattttgccttcaaattcacctggtacttctatgcatccttcttttattttatctgaatatattatatttttatcttccaaaaatatttcactaccttcttttaacctaaattcaagcatattcttactttgtatacttaaatttattttctgggaacttttatttttattttgaatttcaatataaaaattattatacatactccaattttcttttatattttggtaaatatataaataacgttccttatcacttttagaactatctgtttctatttttacacctgtatcttcatatgtaatcctagaacttaaatcagtctctatctttttaaaggataaatctaaaattttatcacttgtcgctgaacttataaaagtagtatttataaaaaaaataaacaccaaaataagatattttgcagaacaaaaaaacacttttaaagtcttcatttcatctctcctaaatatattccatgggttcaaactcatctatacttttttccttcttttcactaggatttgaaacaggaattgtcttattttgtaatatccaatccatcatttcatctcttaaaaagaaattttgcattatgctgtcaatgttatttactttatataagagacctctttcatcgattttaccctcacataaatcacattctaacacaatattttcattaatttccaatgctatttctttaggataaatatttttattctcaaaatttaataatacatattgataattaaaatttactattcttaatttacctgtattttttatatccatctgaaaattcatattgattcttggacttcttcgtgataatgttctaatcttttcaatacgtttttttacattaatttgcaaatcatcaaagaaacctagttgattagatattgtcatcggtaaagtaggtattctatcgtgaacaatacacatccaattatctatttcactatcttcaatatgtgtaatataagctgcatatttccactttgaatttacttccacaacattaacaatctttgctttcatattagctatatacatttcatttcctgatttttctctaaactctacctcgaactcttcttctggggaaatatattctggattttctagcaaaaatgcaaacccattttctgatatatcaatcgtttttgaagaaagaacataagagttttgctttaacttaaaatcaatttcagcaatataacgctcagactttcttaactgttgtctccctgatataaataatgtagccataacaaggttaaaaaggtttccaatcaaccaaaataatacaactgaatatgtcattgaactcattttaaatattgctacaaacatttttaaaattcctatgatagataagaccatgtaaataaaataaggtattccctgtaaaaacttatacattctattttcttctaatttattcttatttgttactgaaaatttatttttagatattgcaaacgtttcaagtattactgctggcattaaagactgaaacattatagtttcatatatattggtccatctagtatttcttatattttgagaaaatattttaagagataaactacttaaaatatacattggcaaccaaaataccaatacttgaagtaatgtacattttactacaatcacattaaacacagaaaataaaataggtgccattatatatacaaagcgttttatacttgcataccaataagtaattgaagaaatataacttattttctgccaaaaacctaaacctctcctaaacaaaatatttagacgtctaccagtttgtatacatccacgtgcccatctttcacgttgcttaataagactttttaaatctgtaggagataaacctgatgcatgtacttctggaatagcataacatctataccccttactttgaattaagatacctgttgcaaaatcttctgtaatagaataagtataaaatccatcaacttcttcaagtgcttcccttgaaataactgtattactaccaccataaattacagaatttgtcctatttctagccaattgaatatctctgtaaaaataatcttgctcatttggaatccttccctcagagtgcagattaaattggaacaagtctggattataaaaactctgtggagtttgcacaaaaccaaccttttcatactcctctttttctccatcttttttagcttgctcatttttcaaaaagtatggtactgtagcaattaaaaagtcatgcattggtatcatatctgcatcaaacgtagcaatcaaaggagagtttgtatgttgcattgcattatttaaattcccagcttttgctccttctctttcagttctagttatgtaatttacacccattttttctgctagaatacgcatttcttcacgatttccatcatcacatatgtatatatgtacctttttcttatctggatactgcatatgaatacatccatttacagtttttctcaccaaatcaacagactcattatatgttgcaatgaatacatctacatgtggataaagttcttcacttatgactggtttttcaggatactcaatatttgacataccataataatgtacaaacatttccatcatacccattatctctacaaaaagaagtattatagcacagattaaggcaaacatcccttcttctttaggtactgtgtaaaaaattctccacaatatatatacgatattagtaataatagttaaagttataagtatcttttttgaatttttcttcataaaatcacctcttttctattaatgcacttaatatgtctctatcccaagtcccttcaatttgattgtatataccaaatccagaagcaagctcccaataagcccatgaaaagtttcgtttttcagcttcttctcttacagcttttatccaagctcttcttgaagcttctggtgcttcttttgttactccaaattcacccaagaatatttttaccttatttttatttgcccaattttctacaatatcaaaccttttttttaaataatccatttgttcatttgttccttcccaagtaatattgctcaagtgctcaaatccattatgataaatgtttccttgaaatgcaaaatcatttggttcgtaatagtgaaaagaaactactatattagaatcttttggaacatttaattcattcaaataatcaatttgatagaaattatatggtcccactataatagttcttttagggttagtttttctaattatctttattgcttcttcaatgtattcgtttagtaattgtgaagataaattttctttaggttcatttaataattcaaataccaattttttatcatatttttgatacctattagctatctgttgccatatttttaaaaactcttctttatgaactcttggttctttcataatttcttcaaaatgatgtaaatccaacacaactattaagtctttatccaatgcataatctacatatttatcaatctttttaaaaaattcttcatcaattttaaaattatcagaatctgacgtataatcagaaaaccttactggtatacgtactgtgtcaaaacctgcatcttttatatcatcaaaaaacttatttgacatttttacatcccacggaaaatccttaggtgattctagtgcattacctatatttatccctcgttgcatcttaactgtatcactgttacctcttattgcaagataaaatccaataaaagctatacttaaaaaaaacattataataatacctattctttttatattaatccccccaaacaatgttatcttccatataatattattcaatccctattatagcaaattaaagtacatcatgttacatataattattgtcatttataaactttatagcgtttatagttagttttaaaacattgaatacaactaaaaaactaaagggctatcttagaatataagtaatcctatttttcattgttgaaacaatgaaactatattgatttcatacaaaaagagtgcctcatgaactaaaaagttcattttgagacactcttatatttttttatactctgtctaacaactctaatacatattttttaactttatcatatccccaattatcaagtgaatatcctaattctatgtcaccaaaacctttaatttcagcattttcttttttatttaataattcttgcataagctcaacttctatatactctctgcccttttctttttctaacattgtaaataactcaaagtcctgtattccaaatcttaaattctccattctgacacttctaactggctttaaatcttttccaggataaacaaagaacatatctccagctttccaaatagggaatttgtaacttgaatctttccaagggtcttctgtccataaattatagtcccatcttaaaaatccatcaagaccaaagtaataagtataccatcctattattctattttctacaaaaggagaacttaaaaaactatttggtttctctggaaaacagcatacaaaccaagtcaatatcccacccttgtcattgatttttttcttaagattttctatatctttataattttgtatagtaagttttaaatttattgacatatcatcaatttcatctttagctctatctaaaaagttttggtcgtgagttgctgatttatatttaacttgatgagtacctacagtagaatttataaattctatacactctttgactacttctggattatttggttcatcagctataatccttactctatcccataatccacactctattaaatgatttaatactaatcctatatattcttttaaatcatttgtattgtttataaatttaaatactttatcattttcatcaaaatatcttactcttatagggtccttataaccttctacaggatttccaaactcaccagcacaccaattacctaatagaccaaataaatctatctccttagacattttatacttatcagctatgcttatatacctatccatactctcaaagttacatttaatctttccatccaatccttttgatacacttaccatgttatattcatataggtttgatggatttttataaactttataacaactttgccctgcccatggataatctgaaactataactgttgcaactttttctcctaaagatgctaattcttttaaatagttatcgactatttcaaaatgtatatcagaccataactcaactttatacattctagctaaacaacttggatgttgccataaatctaaaaagaacttgcttttatctaaaggctttagcacgacatttcttacttttacaggaacatcaattgtacaaactttttcttcatcttcatatccaaagcttttaaatatatcaatacctatattaaggttattttcttcaaaatcttctggtacttgaccttcaatccaaaatgtttgaggcaaatattgctctactaacacatctttatcccttaaaatagcatcattcacaaatgcctttgtatcatcttgaacatatcctaatatatttatactaaaattattttctaaactattaggcacatttaatgctaatcttactctattttccagtcctttccatgatatagtactgcttttatcaattgtacaattaaattcttctgttgcttttagcataatttgaaatgcaaatttttcacctttagctactacaatatccaaatccttctctttccaagtttcagcttctataactgagtatttattgtgtttgaatgtgcaatctttcagtacatatgaaatttccatagtttaaattcctccatatttatataagtttcttttatgttattaaattagactatttaaccttttataccagacaaagacacaccttcaacaaatttactttgtaaaatcaaatagaaaataaatggaggtaaaaatgttattgtagcccctgccatcatctgtccataattagttatctggaatgtcttaagagtagataatccaactgttaatgttctcattgcatctttagttgtagctataagaggccacataaactcgttccatgctcccataaaagtaaatattgctagtgtaattaatgctggtttgattaaaggcaatactatttgtattaaaattctaaaatccgagcaaccatctatctttgctgattctaataactcttttggtactcctaaaatagcttgtctcattataaatacgccaaatgcagttggtattggcataataagtgcaagataactatttatccatcctaagtgtttcattattatatatagtggtatcattgtaacttgggaaggtataattaaagtcattatcataaataaaaataacttatcactacctttaaaatccatcttcgcaaaagaatatcctgctaatgtactaaatactaaatttaataatacacctgaaaaagatactattgctgtattaaaaaaatattgtgcaaatccttttttagtaaagatatctatatagttttgaagagttactgttgaaaaagatatatccaaactatatgagttatatgttatcttcaatgatattatcaacatgtatataaaaggtaccaaacttgcacacgctataaataaaagtaaaccatcacttaataatcttcttgctgttttcatattatacctacctttctaaaaatctgaattgtctcgttttacaagcttattttgtaaaatcgaaactactgctattaacaaaaataatacgtttgctacagtcattgcatatccagaattaaagtttttaaagtttaagttaaatgcatgcataactatactcatagtagatatacctggacctccacctgtcacagtataaattaagtcaaatacttgtaatgaccatatcgaccctaaaaatacaaccattattgtagttggtttcaataaaggtacagttatttttataaattcttgaagttttgtagccccatcaaccttcgctacttcatagcagtgttttggtaaattcattatagctgaaatataaattaccatgaaataccctatatttttccacatagatataaacataagtgtaggtaatgctgtcttactatctcctaaaagtttagatgattctattccaaaggcacctaatacctgatatataatagaaccttctccattcaataaagccctccataccatacctatcaaaaccatagatgataatactggtataaatatagcacctttagcaaatgaagctattttactatttccttttcctgtaatccaaactgccaaaatcaatgataatatagtttggcaaggtactacaacaacagtaaatttaatagtatttataatagatacttttaatgtttcatctgtaaataattttttataattttctaaacctataaaagtggctggactaataatattatactttgtaaaactaaagtatattgacattattattggtatcacataaaacgccactaaaattattcccaatggcaatatatacatatatggtttaatatttaattttgttttttttctttttgaattttcttcaaactctctaactaagttttccattttatcctctccaatataaatattagcattgtatttataaatacaatgctaattttaatctgtaaagtcctttacaacatattacagctttaaacttttattgtgctaataaatcatttgaatattttgcagcatcatctaatgcttgttttggagttttatctcctgaaatcatagtttgaagttctttccataaatattcatatatttcaactccatgaggtcctactactaatggtctatatacatttttgtcattttccaccatttctttgaatctttcatcaccttgatatggttcaccttttgttattggtgctcttggtattgctttatgaaattctgtcattgattcaacacttaacatatgttgtattaacttgtatgcaagttctttatttttagcagatgacattaaagataaatggtctactgctccaaaagttgctgctttcttatcttctagtccagttacaaacccccaatttaaatccgggaatgattcatcaaatacacttgttgcagcagaagataacattattgtaaatgctgctttccctggtccaaatacgctttctatcatttcattactatctttagataaagaatcttcaggcacatatgcttgtaattcttttaagaaattagctgcttctaaaccactcttatcattaaatttaaccgattttaaatcatcattaaaaatatctccaccagcttgccataaataaggataccagttccagtttaagttaccaaaagttttagctccccatccctgagctaatccccattggtctatctttccatcaccatcagtatcttgtgttgcttttttacaaattcttttaaaatcttcccatgtcttaggaggtttctctcctaatttctctaaaatatccttgttatagtataatacccctggatttgctgcttggaatggcataccatacattccacccatcatttcagatgtttttatataaatagattgctctttatcctctttagttgcatagttagtcaaatcttctactgctccactttctataaactgtggatacatttctgcatacatatatcctacatctggaccttcgccagcacttatagctgttgcaaatttttcagaataattatcccaaggaattatctgtaaatctacttcacagttatttttttcctcaaatttatctaaaatagggtcccaaacttccttcatattattttctactggtggcatccaaagaactagtttttctttttcgccatccttttttgaatcttttccatttccacttgaacaccctgttataagtgttgtagtcataattgctaccatagctagtgaacataatttttttaacatacccacttttattccctccattttattttcttttttcatttttattttcttttttcattataattctacacattttcactccatttaaaatattatcaaagcatgtatttattgtctaatcagttttttctatgtacttttttttaatatagtttttttctatgacaacgtttctaatatttataattgataccttccaatttattttctccaatttaaaatttaattacgcatctttttaatctacaataataaaaagctgtagatttttacctacagcttttaaatgatagcatttattatatattattaatattctttgttgataaacttcaaagttcattaacatatttttttaaccttaatattcataatgaattacacttttatattcatcaaaaatcttcttatttaactcatctccaccatcaatattggcactatagaaaatcggaggattctttagccctttattaactaattcctgagtagcttgagctataatagagttcatcacagtagttgctattacagtagaagttggactaactttttggtttaatccatctatctctacacaggcatctcccttttgaccatgattatctatcactaaatcgcatacttcataaagtttttttcctgaagaatgtcttgaagatacactttttgagtaacttaaattagttatacatattactattgccttattttccttagctttcatagcaaactctatacttactggatttctaccagatactgaatgaactataactacatctccttttttaattggagttttatcagctagagctgtaccatatccttctaatctttccatcttacttgtgtgagttataggcgctgtatctaacattagagattttgcaaatactggatttataagaacacagccacctgctctatagaataattcttctgttaatattcctgcatgtgaagctccaaatgaaaatatagcatttttactttctattgcttcaacaaggatttgtactgctttttccatattgactttttcttcgttttctattatatcaattaatcttcttatctcatctatgtatttaaatttcatatctataatattcctccaaatagtgaacctataaacttactaattataccaaataatgaaaggtcgttacctccaaatattagtatccaattttgaatagttcctgagtaaattacagcagatattcctactaaaactaccataaatattgcagctatagctgtacctattatagctccacgtataccaccttgtgattctcctattactgctgctgctccacactcaaagaatgaagttataacaagtggtataagtagcaaattaaatacattaaagtagttacatattaaaatcatagctgtagatgttagcatagcaactaagaatcctattaatacagcatttggtttataattaaataatattggacagtcaaaagcaggtagtgcatttggcacaactttttcagatataccttgaaatgctggcattatttgatttattagcattcttaccccatgaagcattattataagacctgctccaaaagaaagaccttgctttattgcatacgttccaataaactcattactatctttaaacgcacctggtattactatcccaacaactataaacattaaaaacactgccattccaccacttatagatatttctctaaaaaatgataaactttgaggtatgtttatatcttctgtagatttttctttatttcctactaatttagcaacaaatcctgatataagtgctaaacaaccagatggatgacctaatgtaaaagaatcatctcctataacatcaaacacatattttcttaataaccaaggcattattgaccaatagagtgctgataatactgctgcaaaagctattaatactccaccatttaatccagcttcaactcctgaagctacaaatatgaatgggaaccaataaagcatgtgacctgttaagaagattgtcttaataggagtaaatcttgctatcattaggtgaatagctaaacccgcaaacattgctaaacctataattccaccataacttgcagtaaaagtaacatcacttaaaccttttgttactgcaccaccacttatactttggaaagctccattaattggtgctattgaactaactaacatacctgttccagtctccataattataattccgaaagctgcaagtagtgacccctttataacatcagatgctttctttttctgtagtacaagaccaaatgctgctattaatccaattaacatagatggattacgtaaaatattatttgaaataaaatcaagcattatattttttagtgataggtcaactgtttaagttttctaccactaaatccctcctctctttcttactatttttgaatttagtaagtttttattttattctgattaacttaaatttactttttaaaacttatactatttcttatcatttttatcacttaaaaaagtttgaacaacttctgtgacttctgctaaatccatgtactttttaactggatatacatctacattacaagttccttttaattcatttaacaattcttgacttgtgaatatacagtcacaatcagcacctctagctgaatttatatctgtattttctacttcacattctatacctaactgctttagagccttttgtattgtcatttttaataccattgatgaacctacaccaaaaccacatactgctaatatcttcatttttcattcctcctaattttgcttatttataagttctagtattgaacttttatcaccattaattattagttttacattttcttcctcgtacatcatctctgatagtgatgctaatgctctaatgtgagtagtgttatctacagcagctaataccataaatatatttactggttttcctaataaatcaacttcatcttctactattagtaaagacatagcaagcttgtttactccttctttagaacttgcatgtggtagagcaaatctatcagctaaaacaatatatggtccatatttttcaactgactttatcatattttctatatataactcttctatagagttatcttctaacaatggctttgaggctatttttattgcttctttccaatctctaacactttttattatattgaccctttctgcattaattaattcctttaacattggttgatacatctctccttcatctatcttgtgtattatgtttaataaatcagcttttagtgcttcttcattattgataactccattttttcttatagcttgtattattaattcaagattgaaatacttctcgttttcttttacacttattagtttgttcataagtaattgaacatctgatgatgttaaaagaggatttacaacaattacattgtttacattttgtatatctatagttgtaattatgtaatcgtagtatacatttacttcttttagttgcttaatggacactatacctactatttctatggttggtatgtatttatatagttgtatttccaaactctttgataccataagaccattaggacaaactagtaagactttatttcttcttaggccattatccctagaccctcttaaataccctccaaaatacgctgctataaatcctatctcttcttctcttatcccctcaaatacaggaaactcttcttcattttctataattgattttataattttataaagtgactcatgtttatacttagtctcatctaacattggatttctaataggaaacttaaatcgtattctgttgtaagaagagtggaggtgccttaaaatatttttcttaaactcatgcttactttctaattttattgctgtatttacttcaaacttatctataagtttatctacatattcttcaacaacatcttccttaacttcactatttaagctaggaagtgaacttatgtaagtgcatatataggcttgttcattttcattggcttcttcacataaaagttctttacaattactaaagtaactaatttttttagcttcatttagatatttatatgagtataatgttttcccatctcttatccttttatttagaaattccacaaacttagttagatttaataaagaataatcagtaagttttatatgtccttttgtatcgaaactacttacttccttacttatagaattaatttccagtacattttcttgaacaattatcagaaacagctctctaataacgtattcatcacctataattttgtactttcccttatactctaatcttaaccccattgtttgaaggtatttttttacatcagttattgtttgtactactgtgttttttgaaagtaacatttcatttgttagtttttctattgatattttttcgccaagtaatatcttgtttaatataaaagtttttctgtaatcactatctaaaaatttatcttcttcagttgaaattattttccttgcatcacataaattaccttcaaatataaatttgtgttttacattttttatattaccactttttcctagttgttcatttatagctagaatatcgtaataaatagttctctttgaaacattaaacctttcttgtagttcttgtgatgttacattgttatttttaataataaaatctaatatttttttagccctttccttcatactacctccttaattttattatctatattttctacatgtagtgccataccaaataattgcacatgatttagtattattttataattttgcacagtctaaccctaatctaaaagaagacagtggtaaaattattaaaaaaatttgaaaataacctatattatttatacaaataaataagttgatttcaacaaataaaagattaagctacattataatatcaaaataagatataagtaatctaaaaagcacaattatataacaaaaaattgctatattaaaagagagctatcacacatcaattggaattttttgtgtgatagctccatttttatttatttaaaatttattttttaggtctaagttcagctttatctctttttacttcttctaatatttctcttaaattatactcaacactagaaagcacatcctctgcatattcaattgacccaattcttatctcattggctattctctcagctctatcaactatatcttttgctctttggtctgcttgaacaacaggttcgctggattctacatatgcctttactacatcttcagaatttttctttaattcctctatattatcttgatattcttgttgtattctctcagcttcttttttcgcttgttcaactatatttgtagcatcttgcttagcttgacttattattttatttctttctttattaatccatactgcctgtgttacttcttctggtattaaagttcttatatcattaattattgctaaaacctcatctttatccactgtgcatttatgtgagaaagggattgtagaagcacttctaaatatctcctctaactgctcaaatagttcaatcatttctaaatctatcttcatatatcaattacccccactagtttttttctttaattcttccaaaacaatctttggaaccaaattttttatatcagcatcaaagagcaaaacctcttttattaaagatgaacttataaatgaatattttgtacaacttggtaaaattatagtctctatatctggattaagctctctattcatatgtgccatctgaagttcataatcaacatcagcaccacttctcacacctctaactaatgctccaatcccattttcctgacagtaatttattaataaaccatcaaaagtcacaacttttatattatttaaatggcttgtacttttttctataagttttactctttcatcaaagctaaatagaccctttttattaggattatttaatactcctatttgtaattcgtcaaataacttcgaagccctgcaaataatatctaaatgtccattagtaattgggtcaaaacttcctgcaaatatagcttttctaggtttattttccatattatgcctccatcttataaaaagttaatgtagtatttccatatttcttatctctagttttctccaatttacatatcttatctggaaataaatcattcgtatcatgttctacaactattattccatcttcgttcaatagattagaattatcaattttttcaatagcttctataaacatatttttataatacggagggtccataaaaattatgtcaaatttactattttgtaatttaagtttatctattgcagtcttaaaatcaaggtttaaaataatactttcactttcaactcttgccttttttacattggacttaacaatatctatgctttccttactgatatctacaaaagtacatgacttggcacccctagataagcactctattcctaaagaaccagtcccagcaaataaatccagaacttcactttccattatatatgaatttatcatattaaatagagactcttttactctatctgtagttggccttacatcttcattttttggagtatttagttttaatcctctcgcttttcctgaaattactctcaatatgacaatctcccttcagcacattattacattagtaatattttaacataatttaaaattaatttaatgaaatttctttcaatgtatctttaaatttatctataatttcttttttgagtgccatgttttctttcaattgtagattattatcttcacccaatatatatcgagcttcttgttgtgctaacttcaatatttttatatgtttaaataagtttgctactttaagttctggaagaccatgttgccttgtcccaaaaaattctccaggtcctcttatttctaaatccttctctgaaatcttaaaaccatcattggtctcttccattatagccattctttgtctacatacatctgttttagaatcataaattagtacacaatacgatttatgactacctcttccaactcgccctctaagctgatgtaattgtgcaagtccaaatctttctgcattttctattatcattaatgttgcatttgggacattgacaccaacttctataactgttgttgaaactaaaatatctatttctttatttttaaaacgttccattacttcgtctttttcactcgatttcattttaccatgaagcaatccaagccttaaatcgtggaaatattcagctcttaattcctctacaagttcaactgctgatttagcttctatagcttcactttcttctaccaaaggacatacaatgtacacttgtcttcctgattcaacctctcttcttacaaggttattatatgctctatctcgcttacttttttcaatagcaattgtttctattggctgtcttcctggaggaagttcatctataatagaaatatctaaatctccatagagtataagtgctaaagttcttggtattggtgttgctgtcattactaatatatcaggatttgctcctttcaatgaaagtttgctcctttgcataacaccaaatctatgctgttcatctgttataactaaaccaatattattaaattcaaccttatcttcaattagtgcatgtgtacctattaatatatcaatctcattattccttatttgttccaatactgtatccttttgtttttttgtaagactacctattaatagacctacatttattccaaaatcttttagagactcagtaagtgaaatgtaatgttgccctgctaatatctctgtaggtgccatcaaagcgccctgataaccatttaaaacacaatttgcaagtgctaagagagctactactgttttaccactccctacatcaccttgtaccaatctattcattattttctctaaattcatatcttgtataatttcatctaatgccctgttttgagctttagtcagtttaaatggtaaagcacttattattttttttaagtctttacttgtttcaaactttattccatcttctttatttctgccacttttaaatacaaacaaccctagttgtagtataagtaattcttcaaatacaattctatataaagctatttttaatgattccttactacttggtgaatgtatgtttctaactgcaaaatctatactacatagcctatatttttctataattctttgtggcatatattcttgtataattaattctttatcttcaagtactgttctaattatactcataatttctttatttgtaacaccgtatgtaagctggtacacaggcataaatctacatgtattcttaggtgaattagtaagatattctaattcacatgatgtaagttctaagttattaaattttttcttaaccttcccaaaaactaatattgaatctcctggacgaaaagtattttttatataacttttattaaaaaacactaatttagccgagcctgtctcatcttttacatcaatctttgttaaagtcataccttcttttgggctaaatgtatttatacttgatattactgcttttatcgtaactttctcaccatcttctaattgtgctattttctttagattatttctatcttcaaattgtcttggaaaataatacaataggtcttttagtgtaaatatacccagtttatttaatttatctgcttttttaggtcctattcccttaacatattgaacatctttatataaatccaacaaatatatcacctactacacaaaaatcctgtacaaccaattttataaaagctacttggtcatacaggttcttataatcattattcaactgaaattaagtaataataaagaggttgtcctccataatataactctacatctacatcttcaaacttttcttctaaagaagtacgtagttcatttgcttgagattctgtaacatcttcaccaaagaataatgttattatagcagtatcttcatcaaccaacttttcaataaggtttgatgttacttcatccacataatctcctgctgataataaatttccttctgcaattccaattatattaccttctttaacatcaatttcattcatcactgtatccctaacagcaaaagttacttgacctgatttaactgagtttaaagcattcatcatagcttctttattttcatcttcgcttaattctccattaaaagttactaatgcagcaaatccttgaggcgtattttttgtaggtataactattatatttttatcactcaattcttttgcctgattagcagccattattatattgctgttatttgggaaaataaatatatttttagcatttatatgctttatagcattcataaaatcttcagtacttggattcatagtttgaccaccttctattatatggtcaactccgaaatctttaaatatatttgccaaaccttcacccatagaagtagctataaacccaaactctttctcttcttctaaaggttcactatcattttctttcttttcttctacatccagtaatgtattttcatgttgtaacttcatattttctatttttatagttaataattgaccgtactttagagcttcttgaagtacatttcctgggtcattagtgtgtacatgtacctttatgactccatcatctccaactactgctagactatcaccataagccatcattatgtctcttattttagtatcttctaccttagaactttctaaaataaattctgtacaatagcaatattttatatcatctgtgctagtagtactctttgcaaaatccatacttgttgaaatattagtatctaggtcaacattttttatttctatgttatcgccttttatagaagctaacattccttcatatataagtacaagaccctttccaccagagtcaactacaccagcttcttttagattctttagaaggtctggagttctttctaatgaagaatttgattccttcacaagcatacttaaaaactttactacatctttctcttttttcgcagtttttattgcaaactctccactttctctaactacagtaagtatagttccttcaattggttttattacagctttatatgctgtgtctgaaccatttttaaaagcttttgctaaatcttctgttgataatttactttttccttctatagatttagctatacctctgattatttgtgaaagtataactcctgagtttcctctagctcccattaaagaacctttagataatgcttttccgatatctgatatattatcattttcaacttttgctaattcttttaaggcataagatattgttaatgacatattagttcctgtatctccatctggtacagggaatacatttaacttgtcaactaactctttattgttttggagattgtttgcacctgaaataaacatctcccttaaccttttaccatctatatattgaatcatttgtttcctcctatgaaattacttaactcttattccttgtacattaatatcaattctagtaactcttacgccagtcattttttcaactacatactttactctatctattatattattggcaacagtagatatatttgtaccatattgtattataacataaagttcgattgctatggcatcttcttctacttcctcaactcttacacctttagttgcgttctcgccttttaatagctctactattcctttagacttatatgctaaacctactaagccataactttccattgcagctctatatacgacttgagctattacttgattatctatttctatatttccatattgattcgttacctttgcactcatggttgacccccttaagcttatttttattaaaaacatttcttaatttattttttactatttttacttatttattatataaaattataatcatatcatactataaatatggtataatttaaacctagaaaagtttttggataaaatttcttctatagtatatatattcaaagaaaaataataattattttccaaatatatttactttatataaaattatatatataattttatatgataataagaaattcttcaatatgtgtaaggcaaatatatatttctattgcaaatttttgttatttatgataatataaatatgtttttagtctttaaatagttatcattttaaggaggtgtgcgtagatggcaaaagtatgtagcgtatgtgataaaggtaaggtttctggaaaccaagtatcacactcaaataaacataataaaagaacatggtcagctaacttaagaagcgtaagagcgattatagatggagctcctaagagagtaaaagtttgtactagatgtttacgttctggtaaaattgaaagagcttagtaaccacgtttaaaagcctacttccgtaagtaggctttttaatttaatcatttttactctttctcataaattttaggattatacttgaaatccattttggtaattttattgttactactttcatcaatactcaccccacactttatagttaaaactattttaacaaaaaaataataatgctccacatccaataagtattaatgcggtaagtgctgaccaaatccagccaggaagcaacattgacagaattacagccattcctgttgctagacaaagtattcctagcaataccttagacttgttatttctcatggaacacctccacatagaacctgtatctataaatattttcatattcaagtttatgcgacagttttccattttagaccaataaacacattatgtaattttaatttttcatactagaattattactgaactccgatatagattctacaatatccaaaattcctttttttctacttaacctttcaggtccactatataaaaccactggtataactttaggaagtttaaaatttttatcttctatttcttcaaggctttttttcataataaaacttttccaaatttgttctctatacgatttcaatcttgggacaatttcagtatccatttctgtttgaaattctaacactatataatgtgatactttgccacttttagaaaataccttataaattatatcaacttcttttcctttatattcacatataaaagatgtttctaactctatatttttaagagttaattcttttgctattgagacacttgtaaaattttgaatcaaacttaaaaaactttctttatctgaatacattcttctgtactcttctcgtttttcattgcttctttttaaattcatacagttcctcctaggctatagaccttctatattttagtaaagatagtctataaattttattttttaattttcattagtgagtattgacagttgtgtgtaaaatatccagtaaagatatttttttatatttttattaaaagatataaatttttatattttaatatattgacatttacgttgcgtaaaagtgtatatttaatttataggaggtattacttatggaatatacagttcaaaaattaagtaaactagctggtataagtactagaacacttagatattatgatgaaataggtcttcttaagccacttaaaataaattcttcaggttatcgtatatatggtcaaaatgaagttaataaacttcaacaaatacttttttatagagaattaggaattaacttagaaaatataaaaaacattataaattcaccaaacttcgatagtttaagtgcgttaaaagaacaccataataaattactagccaaaagaaagcaaattgatttactaatagaaaatgtaactaaaactatagctctgaaggagggaaaatacactatgacagatatagaaaaatttgaaggttttaaagaaaagatgattgatgaaaatgaaaaaaattatggaactgaaattagagagaaatatggtaaagatattatagatacatcaaataaaaagcttaaaaatatgtctaagcaagattatgaaaattggcaaaacctaaatatcgaaataattagtaaacttaaaaaagcttttaaaactggtgatgcctctagtgaactggctcaggaagttgcaaaattacatcataaatggttgagttacacttggaacacatactctaaagaagctcattcctctctagcacagatgtatgtatatgatgaacgttttacatcatattatgatagagaacaacctggattagctaagtttttaagggatgctatagtaatatatacaagagataaataatataaaataataaaggtggtgtctcaaaatgaactttttagttcatgagacactcttttttgtatgaaatcaaatatatttttatcattttatcaatgaaaaacaagtttctctctctattttgagacagaatctttattgtataataattataatcaatacaaaataataacaaattatacaaaacttacttatactatttatgctaaaaacaaaaaatattttattaaagtttttaaaacttatgtaatataaaaatctatactatagacttgattatggaaagaaaattatcaaaatcattacaattagatatactatctctaatatcattgtcatgaattatctttaaaaggatatcataaatggagtttatttttatataatcatctttatttatagctaacatcatgattaatttaacagtagaatcttcactccaatatattggttcattcaatatggaaatacaaatcttagttcttatagagcttaattccataggatgaggtatagctaaaaaatcatctatattggtagaagataaactttctctgtaaaatacagattcagcaaatgatggaaatacaatttcactttgagttaatttgttgcacatcaactttataagctcatctttatctttgattttaggattaacaataaataaatttttatcaaagaaattgtccaaaagattactataaatatgggaattattagtgattgacttagatatattctctatatctttttttaatagttttaaatccactaatacaataggaatactatcatgatttaaaggaattgtcgatattattatatctacatctgacaattcactagctaaaaattgattaaatgatagacattgaagtatatttattttatcatgaaaaactttgtttaattgaacctctaataacctacttgaaccataccctgaaccacatactaatactacgtttttacacttaatattattttgaaaaaatctctctattccagcacctatatgcagggatacatatccaatttcatcttctgttaaagagtaaatactatttttaaaaactttttctatagcatttaaagttatttcaaatgctaaaggataattactctttattgtatttataaggggattcaccttatttaaattataagatttagaattgagaattgatttaaagtgcagtactaaatcatcaaataatacactatcatttctaaggtcaaaagtatattgattgttgattacttctaaaatttcttcaacatactctataattttagtatccaccctattggaaacgttatccaaaagagaacttttagttataaaatgattatatagataaactctgtctgcctttgaaataattatagtatatttactctcaatataattaaatatattttcaacagttgtattcgattgaaaatctgttaaaacaacatctaaaacattatctaagcagtaaccatcaagtattctacttatagtaatagctaaatggataataaagttttttagattaaaatctagaaaatttatattaaatttattaatttcacttaacactaccctttgaagctctattaaatctacattattaaataattctatttctctatctgtaattccaattatatagttttcaaaattcctatttatcatattattagaaatacatcttcgaatatctatttccttcccttcaactttaactccataatatggcttagaaactaatattaaattatactttgacaaaataggctttattctttttatgtcatttagtattgtaaatttactcacatacaagctattagctaaatcttctagttttatatatgtattgttatagagaatatattttaaaatatattgatttctttctataggagaatctggtatttcacttgaatccataatatcatcagatattaatgctagatactgttggtataatgctaaattaagaatatctatataatatccttctcctttttttattttaataatagcaccatttttctctaaagttccatttatagaagtaatatcatttcttatagttctctcactcacttttaaatgattacttaaagttttacaagtaattttatcatcactttcatttaataatttaaacaacgtgagcaatctcttgtgcataaatatccccccttatagaatttcttctaaattatactatttacactcatataatacaattactctaataaaattgtattataataatttctttccacttctatatggaaattagttattatcataatataaatttccatgtcgaagtggaaattagttatatttaatttaattaggataatgattacaatataaatataagttaagacattacgaatggagtggaaaaatatatggtactacaagaaaaatatatatttatagataaagacttaaaaagcaaagaagaagtattaaattttattgcagatagtgcttatatactaggtattgcaactaataaagaggctcttttaaaagaccttctaaaaagagaaaatgaatttccaacaggaataaaagatggatttgcgatacctcatacaaaaagtgtaaatgtaaaggaagcttccatactctatattaaaacaactaacgagttagagtggaaaactttagatgatagtaaggttagatatgtatttagtttgttagccccacataaaaatgaaggaaatatacatttaaaaactctatctaaattagccacatgtttaatggaggatgattttacaagtgaagttaaaaatgctagtgatgcaagtcatttagtaaaatatataactaataaaatgaaggaggaataattatgaaaatagtagcaataacatcatgtatagcaggattagcacacacacctatggcagcaaaagctttagaacaagctgcatcaaaaatgggtcatgaaatcaaagtagaacaacaaggtgctatgggacgagtaaatactataacaaaagaagaagcacaagatgcggactttatacttatagcatctgaccaaactatatctggaatggaaagatttgatggtaaaaaagtgataaaagtcaaaataggtatagcgttaaaaaaaccagaagctgtcttaacaaagtgtatagaagctatttcttaataaaaaaatctcactctaatatagaatgagaaaaataaaaaattaaaaaattgtctaatgtaattataacatattatcaaaaaatataacaaacttatataggaggattaaaaatgagtaaaaaaaataaatctcttttaagtgaacttaagggacacttaatgacaggtatctcatatatgttgccacttgtaataggctcatctttagttgtagctatcccaaagcttacagctttagcaatgggtataacaagtttagatgcttataaaaatgtatctggtttttatcatattctttacttaatggaacaagttggttggactggcataggtctattaaatacggtattagcaggatttatagcattttcaataggtgagaaaccagctatgggtgcaggttttattggtgggctcatagcaagtaatactaatgcaggattcttaggagcagtaatagcaggtttctttgctgggtatgtttgtaagtttttaaagaaaaaaattaaaatatctgggtcagcatcaggaatgatgccacttataataatgccacttataacagttggattaactggttttttaatgagtgttgtattagcaggacctttaggaaacataaatacttcattaaatgcttgggtagctgaaatgtgtcaaaatggaacaaattcggtggtattggctttaattttaggcgcaatgataggattcgatttaggtggaccagtaaataaagcagcttggatggcaggaaatgcattattgttagagggaatctatctaccagcgatattggtaaactgcgcaatagttatacctccactaggatatggtttagctacattcataagaaaatcaaaattttccaatgcattagctgaaacaggaaaaggcaatatagttatgggtataattggaataacagaaggtgcaattcctttcactttaacaaatccattaaaattagttcctgttaatatgataggatgcgctttgggtgtaggattatcagctttgttaggtgtacatgctataatgcctccagttggtggattatatggatttatatcaataggttctggatgggcttacttagtaggtgcaatatttggagctttagtaatagcaatattatcaacaactttagtagacttcaatgaagatgaaactacggaaaatacagaatttgatgaaatagagttagatataatgtaaattaaaaacttaattttagataattgagaattgagtgtactctcaattctcaattaaattttgggaggatttttatgaaaaagacaaaagtacatgtagttccacacagtcattgggatagagaatggtattttacaacatcaaggtcaaaaatatatttaatgaaagattttcaagatatattagacatattggaagaaaaagaggactttaaatactttactatggatgcacaagcttctctcttagatgattatttaaaatggagacctcaggatgaatatagaataagagatttagttcaaagaagaagattagttattggaccttggtatactcaaacagaccaattggttatatcaggagaatctataattagaaacctttactatggaatagatagatgcaatgaatttggtgaacctatgagggttggatatgtaccagattcttttgggcaatcagctcaaatgccacaaatatacagaggttttggaatagatagttcattattttggcgtggagtttctgatgatatggtagatacaacagagtttatatggaaaggttctgatggttcaaaagtattagcagttcaaataccatttggttattactatggaggtaatataccagaagatgattcagatttaaaagaatatttaaaagatataattggaaaacttaaggttaaagcttctactaataacgtatattttccaaatggatttgaccaagcaccaataagaaaaaaccttcctgatatattaaaaaaagctaatgaaatagataatgaaaatgaatacgaaataagtaatatagaaaactatatagattcagtaaaaaatgaaagaaatgaatttacagagcttaaaggtgaatttttaaatgctaaacatatgagaatacacaaatccatattctcctcaaggtcagaccttaaaataatgaataacaaattagaaaattatatcacaaatgtacttgaaccattattaacattaagttattcacttggaaatgaataccctcatctagttataaaagatatatggaaacttatgtttgaaaatgcagctcatgacagcataggttcttgtaatagtgacacagcaaatgaggatgtatacacaagatacaaacaagccagagatttgagtataaatttattagatttgcatatgagacttataagtactcaaatcaaaaataataatgaagaaataacattaacagtattcaatggattcccagaagtcagaaatgaagttgtagaatttgacacttatattccaggtcaagattttgtgataaagaataaaaatggagaaattcttaattatataataaaagaaaaagaagatattacaaattatatattaactcaaacaataagattaaacccaagtaaaaaaatatatatacccaaaactgtatatagagcaaaaattgcactttcagtaaaagatataccaccaatgggatatactcaactagtttttgaattggatactaaaaataaatgtgaaatagaaacaagtaattgcaaagaaatagaaaacaaatattacaaaataacagccaataaaaatggttcattagaaatattagataaagaatctagtaagacttataaaaaccaagctgtaattgaagacaatggagatgatggagattcatacaactattctcctccaagaaaagatatttatgtttcatctttagattctgtatcttcagtagaagtgctaaaatcaaatattcaagaagaaatgatacttaaatattcattgaccataccagcttcactggaagaaaggtctataggtaaagtttctgtgaaaatgccagtaacaatgaaaattaccttagaacctaaagaacaaataattaagtttaatgttaatataaaaaataaccaagcactatctcatagagtaagagttttatttaatacagaaatagcatctaagttttctatagcagatcaacaatttggaataatacaaagaccaacagtattagaaaaagaccttgcattatggaaaagagacaattactcatggcaagaaaaacctataactatcgaaccaatgcaaagttttgttactttagaggatggacaaagaggaatagcattaataactggttgtgtaagagaatatcaaatagttggtgataatttagatacaatagcattaacactattcaggtcatttggatatatgggaagagaaaatttactttatagaccaggaagagcttctggagaaaaaataatagcaacaccagatgcacaattacttaaagagttaaactttgactttggtctttacatatataacaataaatttgatgaagcaaatgtagctaatacagctaagagattcttaacacctatacaaatatatgaatatgctgattttttaaatggtagacttctatttgcattcaatgacgaaaaacaaatatatgaaaatgaatttagtttgatgaatgtaaataattcaaatttcacagtaagtgcaataaagaaagaagaaaaaggagatggaattgtagttagaatcttcaatggtatgaaaaatgaggatgctaagggaagtcttaacatcaataaaaatgtcaatgatgcttatagtgcaatgctcgacgaaatctatgataataatagcaagcttaaagtaaatactaaaactgtagaggtaaattctttatcacattgtaaagtacaaacaatagtaattaaataatataaaatagcttatacaagatttcaaaataaattgctagtactatgttaatagtaaacccagatattatgctatttataagctctgtaacactaaataacattttgtaaaataaaaaggtgaaccttgtatattaggattcaccttttttaaataaatcaacattctgttttaaaataacatttataagctgttttgaaataatacttacaaattattttaaaacaatacctataaatttttatttaaagaatacacataaatatttccagactcttttattctatagactttataattattaaagaagtctaatctaatttttgttaaaagtaattgtaactttaaataaatcaccatccacacttatattcatcttaccaccctgtaattctataaaactttttgctattgctaaaccaagaccagaaccttctgtgttacgtgatttatctcctcttacaaatctctccattatatcatctacactaaaatcaatctcagatgcagacatatttttaagcataatatttactttattatctgtttctaaaatatcaatatacactcttgaatttggcattgcatatttgcttatatttattataagattttcaaatactctaaatgtacgctgactatctaatggtaatattattttttcattagaaaagttattctttactattagagatgaatctgcaagtttgtcatctaattctaaaagtgtctgcttcattagagatacaatatccacatttactatattcaaataaacatctccactatttgccttgcttacttcaaacaaatcttctattagatgttgcaatctttgtgactttctgtctaatgtatcaatatacaacttacgattttcatctgttatactttcatcttttaataaatctatataagtgattatagatgttagaggtgtttttaagtcatgtgatacatttgatataagctctgttttcatcttttgactcttaacctcttcgtcaacagcttttttaaatccagtttgaatatttcctaattcgtcttttataggattaaaaaatcctaaatctttttccatatttacatctaagtttccatctgaaattttctttgtaacatctaaaagttgattatattcatatattgtctttttagagtaatctgacagtatcttaaataatactactgaatatattaatgcgagtattattccaaagaaccacatactacacattataactataatcaataaatttattcccaaaattgtaactatagttttatttggcttttcttttagatttattgttctaatttgattaataactgtttttcctgctttttttaaccatacaaaaaacattcctgtcacagtatgttttgtaaaatactctcttattccaacatttaaaatatgttttaaaagtattataaatacaaatattattgagaatattacaaaccaataagttaaattcattaaacttaccaatatgctagccattttagcacttatgtcattgtttataaggtactctacataattcccactcaaggtattacttattataacagtaggatataaatctacaagcccctgtataatagcaagagcaataaagagtatctctaacggtattcttaataatgtatcaaatcctagcaactctttagattttctatatgggaatgctaaagctacaataacaactatagctaatataatttttaaaatcattccagaaatcttataataagaattattttctacattgcttatatatgaaattataccatcatcaaaataagtatttccataaccatactctacactatcacctttacttattactttaggtacagcatatactaatgttatattttttattggagataacttatatgaaattgaatttcctcctaaacttgtatccattaaatcttctcttgctttagataacaacatttgattaataactttttgatttactccataagaatccacaatatttacttttccatctttatcaaaattcattacaacgtagaatctatagttttcctttatatctgtaatctgcttttgtctttcctcatcattcatttctgtattttttgactgattttcatcagaattttcttttgaagcatcattctttgttgtatcaagtactcctaattctttattatcattaaaaaattcaaaattgctttctttatcaactaaatagtactttaaattctttcctgacgctttaatgaaatgctcccaattttcaaagttttcattaaaatctgcattaatactatcatctgtataataagtttctgaaccatcataagtatctttttctttacttacattttttatatagttcatagtttcttcattgataaatagctttgatggttgtatcatcttaccttcttgttcttccttcatattatgatataaaacataacttcctttatatatactatctacaaagctttcctgttcaaatggattctttgctccacctttagcacctgcttgtatagtagaatattgactaatcatacctaatgatgctgataacataagtataaaaactataatagtaactatatatttatctttaaattttttcaattttgtatccaacaccccacaccacctttaaatatttaggattttttgggtcaatttctatcttttcccttatattcctcacatgtaccataactgtatctgtatttatagcattttcattccaaactctttcatatatttcatcagcagaaaaaactcttcctgcatttctcataagtaaacttagtattttaaattctataggagttgtttttatatattttccatcaatattaacttcttttgtattttcatttaattctaatccgcctattgcaaacacactatcatcactttctaccttttgctctttatttccaaccatgtttagatacttagtgtaccttctaagttgtgaattaactctagccaatagttctaatggcttaaaaggttttgttacataatcgtctgctcctatattaagccccattattttgtcaacttcttctgattttgcagatagcattattactggaaaattatagttttctctaagcctcattgtaagtgttataccatccattttaggcatcattatatcaactatagctaaatgtatttcttggttttctataaccttaagaccttctaatccattgtatcccttaaaaacattatatccttgatttaatagatatatctctatagcatctgcgatctccttttcatcttctaccaccaaaatattatatgaattcattttaatctcctttatattaatttataaattttctttacatatatgattatacaatatgatagaagtttttccatttatatatatatttatatcttttgttctggttatttgtatttaatgtccatcttagaaacctccttctagtttaaacttaatattttttcattttgttttatatacttaatattaaaattaaaaacttaagatattacatatacttttctaaagattttctaaagatttaaatatatttagaattaatatataaaaaaaagtagttcttattgtattaattaaatcaatgatttgaaatataaaattaatatcaataaaacctactttttaattttttaaatatttatttttaatttatcttgtttttaatttactttgattttaaaatgtccttgacttttattttataaatgtacatatttcttctactggttttttagatggactcttcaaattgtcctctggcactccaagagctaacattgcacctaaaaaatactctcccttttcaaaaccagtttctgcttctaaaacagcttctatctcatctgctgcatagttttgacttgtcaaccaacaagaaccatatccaagttcaattgctgatagtgtaaagttttcaattgaagcacctagactctgcatacctggatttcttataaataatttatctatagtctccttaggtgcatctataagctctaattcataatatcctgatggattatatacctttgtaaaaactaatactaaaactggagcttttaagtaaaatagtgtaaagtttttaacaaattttctaaatctattagccttatccactgatactttatccatttccacaagtatttcttgttgctttttagttatcacatctgctatcttttccattaaatcacggcgttttataacaacaaaatgccagttttgaatattcttgcctgatggtgctgcacctgctgcttttatcatttttaaaatatcttcatctgatacatcttgatttttaaactttcttacactttgtcttttaaaaatagtatcttgtaattccatttttaaatccccccataacttttttattattttaatataatttttaaactcatcttattttaatatatcatgttctaacaaatctttaaatgaatctataaaataatcatatacatctacattcccaaacccatatttggcatatataaaaggtatacctacaaacttagcactatttgcatcaccttgcgtatcaccaacatagattggatttattaatttatttctttcaattataagtttattattttctcctttatgcaaaccagtattaccaggacattcaaaatctataaaatactgttctagtttatgtgcttttaaaaaagattctatatatccagcttgacaattacttactataaataatttatattttttagatagtaatttaagagtatcttctatatcatcaaataatttagctccattttcagataaatagtcacattctttcaaagaacattcattcaataaattcattctttcttcttcacttaaatttggaaataaacgatttgctatttcctcaaaagaaagccccataagacttctaaataaatcttttgtgacacttaattctatttccttatgtttacttaaaacatcctgccagactttgcatacttcttcagttgaatcccacaatgttccatctaaatcaaaaataatactatctaccacaaaaaatcccccttatgtcaaagtttattatatatttataattatatactaaaaagcagatacaatcataaatatattttacttgattgtatctgctctacaatataaaaccaattgtcaaaatcaaattttataaatttctaactacaagtacacagccttgctctactttaatcttacaagaattactcaacataacatttgatattccaataggtacagagtatttcatataataattatcgagagggtattctaagccagtaagtgttacacccttagcatcaccttttatagctgttacagaaacagtgtcccctgggtttccatacaatgaaatttcctcattttcaactatatacatctcttctttatcagaaagtatcctagaatatataccatcttcttttaaataatataatagctttatatttgcaagagtgtggtcaatccttccccctaaagcaccaaaaaaatcaatatgatttgctttaagtgtcttagctaaaaaaagacaaagctctgtatcagtctcatcttttttagatggaaatttttcaaatttaacacctttatttttatagaagtttatcttttcttcttctactgaatctaaatctcctaatatataatctggcattatttccattttataagtgtgatttgcccctccatctgcacatattatgcagtcataacattccttaattataatatctcttgtaacttcgtaatcttcaatttcgccatttaaaacaatacagattttcattattaaatttaaactaattcttcaagagaagcattctttctaaataaattaactgtttcttgaatgtcatcacttccaaatattgcagaacctgctactattacattagctcctgcttgtacaacttcggctacgtttttagggcttataccaccatcaacttctatatcaatgtttaatccttgactatctataatagcttttaactctttaatcttatctaaaacacaaggaataaatgattgtcctccaaatccagggttaacagacattaataataccatatctaaatcaggtagtacatgtttaatcgtatctactggtgtagctggattaagtactacaccagcttttattccatgtgattttatattttgtatagttctatgtagatgaacacaagcctcctggtgaacagttattatatcacatcctgcttttacaaattcttcaatatactggtctggattttctatcataagatgagcatcaaataccatatttatattttctttctttaaacttttgactacaagtggtcctaatgtaatgtttggtacaaagtgtccatccattacatcgatatgaagatattcacatcctgcactttctacttttcttacatcttctaataattttgcaaaatctgctgataatattgatggtgctaatttaatcatttttctaatacctcctactattattttgtcttatttcatgtagcagctgtatataactatcatatctttctttagatatttctccatttgtaacagcttcttttatagcacaattaggttcattttcatgaatacactttgaaccaaacttacaatcattaaatttatcaaattctataaaataatctttaagttcaacttcctctatatcttcaagtgcaagggaactaaaacctggtgtatctgcaaccattccaccaaattccaattttaaaagttcagcgtgacgagtagtatgttttcccctttttattttatcacttaccactcctgtttgaagtttaaaattttcatctatttcatttaataagcttgattttccaactccagatggtcctgcaaacactactacattttcttttaattcttcttttactttatctatatttaacttagtaatattgcttacaggaatgactttatagccactaagttcatatatatttttaacagtttctaatgtatcattatcatctaaatctgcttttgtaaggattattacagtttctaaattttctttttctgccaaaactataaatctatctaaaagagataagtttggtttaggattttttattgcgaatactattaatgctttatctacatttgcaataggaggtcttataagttctgtatctctactgtcgatttcttctaagataccctttttttcatcttcatcaacaatgcttattttgactctatcaccaaccaaaggtgttattttctgctttctaaatatccctctagccttacattcataaataccattataagtatctacataataaaatccactaatcccctttataatttttccttctagcatcaaatgcctccctttataaaatttatataaacacatactgtttatgaatagtatatcgtgttattctttcctatttttatataataccacattttttttaaataacaaatcctccgtttggactaattacctgaccagtgataaaatttgatttgtctgatgccaagaaaatagcacaatttgctatatcttctggagttcctagcctcattagaggggtttcttccacaagagcgtctatatcttcctcattatatccagataacatgtcagtattaatgacacctggagctatgctatttactctaatatttgatggtcctacttctttagctaatgcctttgtcatacctattatacctgcttttgttatagaataatgcacttcacaagacgcacctgatataccccagattgaagatatattaattatatttccttttttttctgatatcatgtattttaaagcaacttgcgaacaataaaagcttccttttaaattaatattcatcatattatcccaatcttcatcggttatatctgtaaacaacttatcttgacttacaccagcattgtttacaagtacatccaatcctccaaattcttttatacaataatctaccatattctctacatcttctctatttgaaatatcagccttaaaaagttttacagaaaaatttttttcatttaatatagtatacaactctttagcttcattttctgacttattaaaatttactaatacattgtaaccttcttttgcaaaagctttagacatagctttaccaatccctctagctcctcctgtaattaaaacggttttcttcttcataaatacttttctccttatattataaccaattcagtattttatacaaaacaaactgccctttaaagaaaatattttctataaaaggacagctcttattttattaatatttattctgttttaccaatgtttgcgccagttcctgatgaagttcctccattatctcctgagtttgagcctcctgaactatctccattgtctcctgagtttgaacctcctgaacttcctccattatctcctgagtttgaacctcctgaacttcctccattatctcctgagtttgagcctcctgagcttcctccactatttcctgagtttgaacctcctgagttacctccattattgcctgagtttcctccactatttcctgagtttgaacttcctgaatttccaccactgttccctgagtttgaaccaggttctgttggtgtattattctctggtgttgttggttttttatctggtactgttggagtctgtgtatttgatttttctgaacctttgcttacatataggtttacctcatcaccttcctgagctcttgatgagccagcacctggactctgacttaaaactgtaccttctttatatattgagctatattcatacttaacagttcccacttttaagttattttcttcaataagttgttttgcattactcaaagtaagtcccaccacattaggaacagatgcctgacttgaacctttacttacgacaacatttatagtatcaccctttttgacatttgtacttccaccttcaggtgtctgtgatattatacaattttcatcaacttcactattatactcttcactttttacactcaggtataatccttctttttcaacagcactttgagcttcttctaatgtcatatttacaagattaggaacagtcaaagatttattgccaaaccctccagcaaataaaaacttatatgctaagaatacttgagcacacaatatcagtatcaaaacagccgcaattacttttaatcttcttctagattttgggctttcctgttttttcttctttttcttagttctcttacttggagtactcttaggtctctgattctttttagctctcattatctcttcctcttcttcttcttcttcttcatcttcttcataaaaatcatcatagtaatcttcatcatcatccaaatcagctacttcaacaggcttaaccactttttcaggagctggttttgcaagtgttggatttacaactttattaatttctttttcatcaattttcttagttgcaaaatcatcatattcttttataaaatctaaatcaatatttttttctatatactctatatcttctatcaattcttcagcagtttgatatctatctgcgctagatttttctgtaagcttttttattgtagttcttacactttgaggaatcctaactttttcttctgatgtaaagtctatatcatcattaatgtgttgaagtgctatagaaattggactatctcccctaaatggaacttttcctatcaacatttcatataaaactatacctagagaatacaggtcagcattattagttacaaatttacctttagcttgctctggtgaaaaataatgcactgaacctattatactaccaatattagtcattgttgaatttgaaacagctttggctataccaaaatcagccacttttactactcttccttcatttgatatgagaatattatgaggttttatatctctatgtataatcccctttttgtgcgctgcactaagtgccatagctatttgttttgttatatctaatgcagtatattcatctaatataccttcatcttgtataatctcttttagattcttcccatctacaaactccattacaatgtagtgaacttttccatcttcaccaacatcataaacatttactatatttggatgtgaaagacttgctactgcttctgcctctcttttaaactttgttagaaattcatcatcatctacaaattcaggtctaagtactttaagtgcaacagtcctgtttaataatctgtctttagcctcatatacaaaggccattcctccatcaccaatcttcctgatgatttcatatcgatttcctaaaattgtatctcccacaatatcaccgtcctaattatacttttatcactataaccgaaacattatctttaccagaaacatcattggccatacttatcaattcttcacttatattactagttctctcatattcataatctaatattaaatctcttatatcttcatcatcaataaacccagttaatccatctgtcgcaagaagtattatatcactttttttgatttctttcttaaaaatatctacaacaaccatatcatctgttccaattgctctagttattctatttctctgtggatgtcttcttgcctcttcttctgtaatgacatgggccatcataagttcttcaaccacggaatggtctatagttattttatcaaatttttcatctgttaacaaataacatctgctatctccaacatttgccacatataagacattattatacactatagccgtaactaatgtagttcccattccttcaaattctatatcttccatagattttttgtgcacaattgagtttacattattataagcctgttttaatatatcatctatatagtctatttttacattatcatgttgtaataagttttcctttagaaaatcaattatattttctactgctaatttactggcgacttcaccttttttatgtccacccattccatcagctatggcaaatattcctattggaccatgttctgtatctataacttctccctcacaatagtcttcattgttttttcttatttttcctatatgggaggcacaactataaaccatacgacttcctccttacaaattacttgtattttcttctcaattgaccacaagctccactaatatcagaacccatagacatcctaactgtggcaggtatattgttcttctccaaactatccctaaatttataaataaatgctttatctggcttttcgtattctctttcttcaactttatttattggaattaaatttacatgacatagcataccttttaggagcttagctaatgcctttgcttctttttctgagtcatttactccttttataagagaatattcaaatgtaacccttctatttgtcttttttatataatatctacatgcattcaatatttcttcaatagaataagcatttgctacaggcataatttttcttcgttcttcatcatatggtgaatgaagtgataaagctaaatttatagctatttctaagtctgccaactcatacattttaggtactattccacaagttgaaagagttatatgtctataccctatattaagaccatttttttcgttaattatttttaagaattgttttgtattttcaaagttatcaagtggctcaccactccccatcaatacaagatttgataccctcttaccagtatcttcttgaattttaataacttggtctaaaatttcccatggctctaagtttctaattaatccatccattgtagatgcacaaaaattacatcccatcctacaacctacttggttagaaacacagacagtaactctactatcataatccatcatcacagtttctattatatttccatcatctaataaaaacaaatatttttttgtattatctaccttagattctaactttaattctatatctatattccctatacatgaaacctcttctaatttatttctcaaactttttggtatattgttcatatcatcaaaagtttttgcacccttatatatccaagagaatatttgacttcctctaaagggcttttcatctatagttttcataaattctttaagttcatcttcagtaaaattttttaatactatctttttcttttccattctctcactaccttattctctttaattttgctatgaaaaaaccatctataccatgaatattaggatatatctttaaatatcctttatcttgattgtctaagtctacatttactgtatcaattggaacaaattcaaagttgtgattttcttcaacaaaagaagtaactatatttatattctccacatcttgaattgtacatgtactatatactaaagttccaccaactttgacatatttagatgcattttctaaaattttcttttgtatagaagtgatgtcttttaactcttcttctttcttatacttaatttctggtttacgtcttattataccaaaaccagagcaaggaacatctgctaaaacataatcaaatttacttatactattttcatcaatctcagaagcatcaaatctttctacaaacacatttttaagccccaatctatttacagtagagtttataagctttagtttatgctcaaaaatatctctagctactacttgacccgtattgttcattaaagtagctaagtgagtagatttccctccaggagcactacatacatccaaaacaaatgaaccttcttttggattaattactttccctactatcatagaacttatatcttgaattgtaaataaaccagccttaaataattcatttttttctatatttttcattttttcgactttaatagcttcttctaccataggaacttttaaacatacaatacccatttcacttaatttttcaataagttcttctctacttattttaagtgtattcgttcttatatagatactaggcttttcattatttgcttccaacaaatcttcagcaaattcttgtccaaatttatctatccagttttttataatccaagagttataggaatactttatagataagtattttacactatcttcctcagttatgtccattatagtctctttagctcttatttcatttctaagaatagcatttatgaaaccagaagattttttatcatatttcttagataattttacagtttcattaactgctgcataatctgatatactatctaaaaataaaatctgatatgttcccattcttaaaaagattttaacataagttgacattttttttacctttatttttgaaagtttattgattatataatctaaataatatttattttctattactccataaattaactctgttgcaagtcctctatccatatcacttatttctaaatttttaaaatgcttatttattgcaatatttgaataattgtcatttttttctatatcacataatactttaaatccaacttctcttgcatccatataaatttctcccttttattaaacataaaaaagggttgtttctaaacaacccactttacttttagtcatttcttctttgagctattagtaacaatctaagtaattgaagtattgaaaccaatgctgctgcaacatatgttaaagctgctgctgaaagtactcttctactttgtcttgactcactttcatctataatacctaaattcccaagttgaacgattgctctacttgaagcattaaattctacaggcaatgttattatttggaataacactgaagccgaaaacaatagtataccaatttttaaaaatggaccagccataataaatcctaaaaatattaaaaaccaagatatacttgaagcaaaattcactactggtactaaactacttcttatttgaagaggcgcataacctttagcatgttgtatggcatgaccacactcatgtgcagctactgcaacagaagttatagatgttccataatatacatcttctgacaaccttacagcctttcttcttgggtcataatggtcacttagatgccctctaaccatttctatctttacatcatacaaaccatttgaatcaagtactcttcttgctgtttgctctccagtatatcctcgacgtgtatttactcttaaatacttatttgttgttgaactcactttaaattgtgcatatatagtaagtaatatagctggaattaatacaaccattgttgggtcaaatccccaaaaaccgccatatacagggtacataaataacactctcctaaaatatatttttattatacatcctcttaatattcacttaacttaaaaacagtttaattacaaattaatatattttttcctgttaaaaagtctatagctttttcaatatccatcatgtctacattagtatttacacaaggtccattaggtcttttgttaaatacacctaaaacaggaattttcttaatatcttgtattccagatgtcaaatctctttcacatgcaacagctacaacagctttaggtttattatccattataatttttctagctagggttcctcctgtagctacaaatatttttacattagttttttcctttagcttaattaattctcctacgttgcatcttccacattctttacaattatctatatcattagtaacttttaatttacaactattctcttgaatacaatgaggtattaaaattattatatcctctggattaaaattatatttattactgtatatatattcattatttaactttatatatattcttctaatatcactttttgacataccaaatgatgatgcaatgaaagatataataggaaataatccactgacaatattaaaatttattttcattatatttgagttaacatactttcctttaattactctataagtaactgctgttgaacatagtattataagtattagtgatattattataatatttatcatcaaggagaatatttgagttaaacttattataaaaaaattaacaactcctatcaaaattcctaatattaaaatcaaaatcccaacacttgttaaatacttctttatatctgtcatacttttcacctaacccaatactaaaccagtttctatagtattcccttttatatattcaccaaccaacattctctttttattcggcatctgaatttcttcaattaaaagtacattatctatagtacttacttttatcccatctttgcttacatcaattattgtacctacatcttttgtgcttttttcatctaacactttagttttccaaactttcattatgacatcattatagatagtataagcacttggccatggatttactcctctaactaaattgtgtatttctctggcactttttgaaaaatctatgttacctaatgatttattcattattggcgcataggaaaattcttcatgattttgtacttctcttggagcatttccttcttcaattaatcttaatgtttcttttaaagtttctgctcctatattcatcattttatcatgaagttctcctgctgttatattttcatcaagatttacttctgtctttagtatcatatctccagtatctaacccttcatccatatacatagttgtaacaccagtcttttcttcaccatttattattacccaatttataggtgccgcacctctatattttggaagtaaagaaacatgaacatttatacatccaagtttaggaatctctaatatttcttttggaagtatctgtccaaaagctacaactactattacatctggatttaaagatttaattttatctataaattctttatctctagcctttactggttgatatacaggtatattattttcaattgccagttcttttactggactcatacctagttttttacctcttccttttggtttatctggttgagttacaacacccaatatttcatacttctcatctattattttttgtaaacatggaactgctatatcaggagttcccataaatactattttcatcaaatcaactcctactacttttctattttgtcaacaaataaaattccatctaagtggtctatctcatgacaaaatgctctagctaaaagttcttctccctctaactctattgtttcgccatttctatttaaagctctgacctttacataatttggtcttctaacatttccagcttctccaacaacacttaaacatccttcctcatctatttgctccccagatgtttctattatttcaggatttataagttctataagctcttctccaatatctattactactactctttttaatattccaacttgaggtgcagccagtccaacaccatctgcatcatacatagtttctgccatatcatctaataattgtattatcttttcatcaattttttcaaccttttttgatttttttcttaatactggttctcctatttgaactatttgtcttaaagccattataattcctcctaaatttataatacactgtttggattaatatctatagatacattgatattcttatcaaatatcaaatctcgttttgttatacatatatattttattataccctttaagagattaatttcaatattttcatctttaaagagtatttgccatctataattttgatttatttttgatattgaacatggatttggacctaatataaatcctaaatcatttataccccttttttctaataaataaatcaatgatgcatgcatattttttatattttttatcactaatctttcatcttcaccactaacaactacacttaacatattattaaaaggagaatatccaaatgcttttcttatttttatctcatcttcataaaaaccctcataatcatattcaatagcatgcttaatagcatagtgttcagtgtcataagtctgaagtactacttttccctctttatcagctctccctgctcttccagagacttgagttatcaattgaaatgtagtttcaaaacttttaaagtctggaaaatttaatatcatgtctgcagacaaaatacctactaaagttacattctcaaaatccagccctttacttaacatctgtgttccaataagtacatctgcttctttatctttaaatttatttagtatctcatctaaagcacctttttttgaagttgtatctttatccattctcaaagtttttatatctggaaaaatatattttaattcctcttcaattttttgagttccaactccaaatggcttaacataagtacttttacattcaggacactcttttggaatttctttctcatatccacaatagtggcatcttccagtattgcttttcttatgataagttaaagatatatcacaattttcacattgaaacacatatccacactttctacaagatacaaaatttgcataacctcttctgtttaaaaatagtatcacttgattattttcttcaatcgcataacgtatttctttttgtaatttcaaactaaatatacttctatttcctttatctaattcatctttcatgtctaccacttcaatgtttggaagaggcttatcatttgctctactttttatatttataagtttgtattctccagattttgccctataatactcttcaattgagggcgttgctgaacctaaaataagagttatattattttttaatgccataaatctagcaacttctatagcattaaattttggattcttctcagacttatatgatgactcatgacattcatcaattattattaagcctaaggaattaaaaggtgcaaataaagctgacctagctccaattaacactcttactttacctgctttgacagctttgtaaacatcatgtttttctccttcagatagtttactgtggaacactccaactaaatctccaaacctactctttagcctatctattgtttgaggagttaatgctatctcaggtactaagaatatactgtctaagccttgatttagagcaaattctattatttccatgtaaacttcagtttttccacttccagttactccatgaattaagtatggttttttatcatctacaaacatattcgactttatctcatcaactgcttcttgttgttcattgtttaattttatactttttagtacggatttgtaaatactttttggctctctataataatccttaaattctagggttattagctttttcttacttagagaatttatactttgttttgaagcatttaataaatccaataaatcatttatctctacattttcattatttttaagaaaacttaatatctctttttgtttacttcccacatttattttattttgctctatataatcgtcaatcttatcactttctaaactcaaagatatataacatactttcttttcatttttgtgatttttatattcccaacataattttataattccatttttattcattgtgtacaaagaactatttaagtttggtatatattttaacttatcaaccttaattttacctttactatcaatcactttctctactatttctctatttttatcacttaaagttgatattttttccttcaattcaatctcatttaatccacttaaactttcacctaataggactactttataattatttaatttgtatccctttggatatatcaaatttatacattctatataagtacacaaatatctatttttcatccaataaaccaactctaaatcttcttttctaaatattggattttcatctaatatatcaataatttcttttatttttattttttcatctaagctatctgtaaattgaaatacaaaggcttctgttggtttattaccttttccaaatggtactaatattctgtgcccgatttttattacatcagataaaaatacaggaatttgatatgtaaataaattatctgtatatatagtattacttctaactattacctttgcatattttttcattataaaacctctacttaaatttaatatattgttcatattttaatatactttacaagatattaaaatctcagaatttataagcaatttcaagttattaatattaactttattttaataattaactattaattatattttatactttatgacaaaataaatgctgaaaactacaatttaactgacatttgcgagtttttactcgctaaaattaaattgcagctttcagccactttagctgtgataaaatacacaaatatcatatttaaaaaaggtcttatttctcaagcaacgctttaactttatctaaaataacattggctacttcttcttttttcatcttaggatactcagtaatatttccctctacatctattatttttacaatattagtatcagctctaaaaccagcaccttctttagttaaatcatttgccacaataaaatctaaatttttcttttttatttttcctttggcatgttctataaggtcattagtttcagctgcaaatccaattagtatcttatcttcttttatttttcctatttcataagcaatatcataatttctacttagttctattgataaatcatcattcttctttttaatttttttgtcagaataagtttttggtttataatctgcaactgctgcactttgaattactattttattttcacttaaatttgatactactgcttcatacaaatcttgtgctgactctatttgaacaaattttttaagattttgtggaatagaaagatttgtaggacctgatattaatgttacatcagcacctctagctatagcttctcttgctatagaatatcccattttaccagaagacctattagttaaatatcttactgggtctatactctctacagttggaccagctgtaactatcatactttgaccttttaaatcttgctctttagtaagattagtcaaaacttcctctactattatgtctggattagctaatttgcctgttccaatatctccacatgcaagcctcccactttctggttcaataaatttatatccaaagctctttaaagtttgtatatttttttgaacaattggattttcatacatattagtattcatagctggtgctataagaacctgtgctttggttgccataacagtagttgtcaacatatcgtcagctataccatttgcaatcttgcctataacatttgcacttgctggaactattaagaataaatctgctttttttgctaatgatatatgttcaacttcccaagtttttggttcttcaaacatatcttctactacataattttgactcagcgattgaaatgcaagtggtttaacaaattctgttgctgattttgtcattataacatggatatttgcatttagtttttttaacttacttacaacatcacaagccttatatgcagctataccgccacttatgccaattacaacagttttatcttttagcatgaccttactcctcttctgaaatttgttggtgttgctcagcatgatgtctagcttcttctatctctatttcctcttctgtcaataatctatatgttatttttccacttgcaacttctttagttgctacacatacaggcttttccttagttttatttgaaacatatggttcttctccatcaattaattttcttgctctctttgaaacagtccctactaaatagtatctgttgtctattttttctagtacctcattgatagatggttttaacataattataattcctccttaaatttctctattataatatttttatatctgctaactttattcttttcagatgatattataccttctatttctttagcagatgtttttacatcttcattaaatataaaataatcataatccttaatcattttaatttcttcatatgcacagctaaatctcttctctatttcagcttctgtttctgtacctcttccaacaattctattttttaattcttcaagtgatggtggtagtacaaatataaatactccctctgggcaaacttcttttatttgttttgctccttgcatttcaatctccagtaatacatcttgtcctttttctaaacattccattattgccgcttttggagttccataaaaattatcataaatttgagcatactccaaaaactcacctttttctatcatctcttcaaacttttccttacttatgaagaaataatttactccatcaacttctccagttctgggttttcttgtagtagctgatacagaaagttttattgtatcattttctttaagtagttctttgcaaatagtaccttttcctgcacctgatggtcctgatacaactagcaataatccttttttcacaaacatttaagcattccccttctaatattgtattcttactctatattttgtatttgttctcttattttttccaattcgctttttacttctactactaaattagttatatttatatcagatgacttcgaacctatagtgttagtttctctattcatctcttgtattaagaaatctatttttctacctatagagtcgtctttaaatatagtatttttaagttgccctatatgacttttaaatctaactatttcttctgttatactgcttttatctgcatatattgcaacttcttgtgctaatctattctcatctattatacttgggtcatccagtaattcacttattctcaaattcaatttttctctataatcttctacaacactacttgaatatttttcaatctcttctatatgattttttaataaatcacatctcatggcaatatcttcagctaattttttaccttcttcacttctcatttctcttaatttgattaatgcatcttcaactgcttgattcaacattgaccacaataaatcttcatcttcttccttttcttctattttcacaatatcaggaaactttgcaacattcataacgctaatatcatctataatatcaaatttattttttatttcttttagtatgtctatatactgagatgctaatccctcatcaaaatttaagtttacatcttctttgcctaataagtcaaactttatgtataaatctactcttcctctttttacataattttttactaaatttctaactttatcctctaaaaatgaaatttttcttggaagacgtatgtttatatctgaatacttatgatttatcgttttacactctactaaaaagtaataattatcatccttgtattctcctcttccaaaaccagtcatacttatagccattaattaaacctccaaaacaccttcacatatttttactgctggacctgtcatataagagaaatctcctacatctattttaactgttccaccttgagacgttacatttacactactttctaccatattaagtaaattgcacactattgctgatgcagtcataccagtaccacaacctaaagtatatccacaacctctttcccaagtataaacatgtatattatacttatcttctacctttacaaaatttacattcgttttttcaggaaatattttattattttcaatctcttttccatatttacaaacatcatctacatctaattcatctactataactactgtatgaggaacccccatcaacatagaagtaactttaagctccctatctaaaacctttatactttcttgcacaaaacgttctttatttgtaagtacaggaacatccttagctataaaacttccttttcccatattgactcttatagagtttatttctctattggtaagatttatttttatatcttttataccatctaatgtatctactgtaaaactttcttttttaactatacaattatcataaacaaatttacaaaaacatctaaggccatttccacacatagctgctcttgaaccatcagaattataatataccatttctacatctgcaacttttgaatctttcacaactaacaatccatccgctcctacagaaaatcttctatggcatactttttttgctaaagcagtataatcagatggatttatctggtcgaatcttccatctattgctataaaatcatttcctattccatgtagtttccaaaatttcataagtatcgctccttcgtaaattaacgcttaaactattataacataaaaaaattcccataaacttataatttatgggaaaagttttgtaatgacaactataatttgaggatgtgagggagagttgtcattacaattagggtaattatattatgtttttaagctagttctttctatgtttatatattaatatttctatatgaattttatgtatgttttatttaaactgtctatgaattttttaattaaacatctggtaaccagctataatccttttagtagatatctattaacatacacctattaattctttaagtgtttttaaaacatagtctaaatcttccttagtaatatctacatgagttacaaatctatattcaccattttccattttattaatttttatatttctttcaaaaaattcttttattaaaacatcctcttttataatatcttcactcatcttaaaaaataccatacttatatctggattaacattgtttacttcaatgccatcaattttatttaattcacaagctaaatattttgcattttcatggtcttcattcaatcttaaagtcattttttcaatggcaattataccagctgctgcaactatacctacttgtctcattcccccacccataactttttgctttcttctagcttttgctataaattctttacttccagcaagtatagaacccattggtgcagctaaaccttttgacacacagaacataacactatcacaacactttgctatttctttagcttctacacccaaagttaatgctgcgttaaataatcttgctccatctaaatgtactggtaagttgtgtttctcagctatttttttaatttctcttaaattatcaagactcacaacagttccacctgaatatgcattttctacacatataagccctgtctgtggttcatgtatgtcatctcttctaattgccttttcaacaagttcaggatttagagctccactttcgtcttcatctatagttctaagctgaactccagctattacagcaggtgccccaacctcatgagttacaatgtgataacctttaccaataattatttcttgccctcttaggcaatgagtaaatagagctaattgattcccaaaagttccacttggaaggaaaatagcatcttcttttccaactttagctgctgctaattcttcaagtttatttacagtagggtcatctctaaagattgaatctccaacaggagcctttgccatagcttctctcatttcgtcagtaggcatagtaacagtatcacttcttaaatcgataaatctcattttttcaaccttctttcatatttatatactatagaaccttaaaattgattttttctgtaaagttcatatactttcatagcttatactctacacaataattatactatatttactttatatttaatctactttaaattattaattttaaaaataaagtttcctctctaataagtataaataattatacaatttaaatattaatctctatcgtttaaattccccctagtcacaaagcgtatattatgtgtataattaatttactgactcattttggtcaaagaaaggggtgctataaatggcattagatggattagttatacattcaatagtcgatgaattatcatcaaaacttacaggtggaaaaatagataagatacatcaacctgaagatgatgaggtaatttttaatataagaaataataaagaaaattttagattggttttaagtgcaagtgcctcaaatcctagagtttatcttacaagtaattatcaaaaagaaaaccctctaaaagcgcctatgttttgtatgttacttagaaaatacatacaaggtggaaatatagtagaaatttctcaaataggttttgaaagaataataaaaataagtgttgaatctttagatgaattaaaagaaaagacagttaaaaatattatgattgaaattatgggaagacatagcaacataataataactcatggtgaagaaaataaaattatagattctataaaaagagtcccttttagcataagtagagttcgtcaagttttacctggtcatgattattcattaccaccagaacaaaacaaactcaaccctcttgatgatatatctaaggatttgtttattaaaaacctagaagaattggaaggacctatctttaagtctatatattctaaatttctaggtataagccctattatagctaaagaaatttgctacagagcaggtgtaaatcaaaatgctatcataaaggatatatctgatgaacaatttgattctttacacaaagtattttgtaatttattcaatgatataaattctaacaaatactccccttgcattattatagataaaaaggtggataaggtagttgatttcagttgtataaaccttacattatttagcgatttatcatatataaataaggatagtatgtctcgtattctagaagatttctatagaactaaagatattaaagacagaattaatcaacgttcatctgatttaaagaagagtatatctgttaagcttgatagactttataataaacttaaaaaacaagaagaagaattatcagaatccgaaaatgcagacatttataagataaaaggagaattgattacttcatatatttatatggtagaaaaaggtatggaaagtattgaaattgctaacttctatgatgaaaattgtaatgatgtaacaatagaattaaataaaaacttgacaccatctgaaaatgctcaaaaatactttaaaaagtataacaaaatgaaacatgctaaagtcgagatatctcatcaaatttccttaaataaggaagaaatagattacttagaaaacatagttttaagtattgaaaactgcgaaaatttagctgaattacaagatataaaagaagaacttgctaaggttggatatatcaagactcaaaagaaaaacagtaaaaaggatactatcccatctacaaaacctcatgaatttgtgtcttctgatggatttaaaatattggttggtaaaaacaataagcaaaatgactatcttacactaagacttgctgataatgatgacttatggatgcatacaaagaatattcctggttctcatgtaataataaagtgtgctggtaaggaagtccctgataatactgtatttgaaggagctatgctagcagcattctttagtaagtcaaaactttcttctcaggtgcctgtagactatactaagagaaaaaatgtgaaaaaacctagtggttctaaaccaggtatggttatttatgaaactaacagtactatttatgttactcctgaagaagaaacagtagccaagcttaaggttaaatctgaataaattctgcactaaatacaaaataaatgttagacaagcacacattatcattctaaataaaaatagtggccttcttataaagtacaataataaggccactttctaattagcttacttttaattttctaacaaaatacttttctgttttaataactatacttatattcccaacaaatattttcagtcttcttatatagatgtaattaaaaagttaacactaaaagctattttttaatttagtgatttgttttagtaattcattatattctgattcatacaattctttttttagattatctttttctatagataacatagatataacagttgtaagtctattttctaatactagaagattctcttttttgatttgcttgtctctactaggagtttttttatttctgctaattatatattcgtcataattacaatcaaactcccttattttagcatcttttatctctataatatagttacaaatatgtgatacaaatactctatcatgagacactataagcatagttttatcagtatttatcagtgccttttccagtgcttccatagattttatatctaagtaatttgttggttcatcaaatactaaaaaattattatcttccaatattattttacatagtgctatttttaccttttctccaccactaagtacttttacttttttgtagacatcatcacctttaaacccaaataggcttaagtttatccttataaaagattcatcaaatgaactattaactttagtattgtatagaacactcttttcctcatctaataaactttgattttggtcaaaacaacctacttttaccttgttatttatttttatattgtcatttttatcagccaatatttcttttatcagagtactttttccacacccattatcacctaataatgctatctttttacctctttttatcttaaaggaaacattatctaacaagagcttattttctaactttagagtcatatcttttacctctaatagatttttgctaattatctccataccatcttgaatcttaatgttcatttctttagaaactttaggtttattctttacctcaagtttatcaattctgctttttatagccttcacatttgagtccaactttttcttattagtctgaccacccattttgtgcaacctagcttctgaattacccattctttttggtgtctttcttatgccatcacttaaagcttttttatataaaagagctttttcaagcctttttttctctttaacatattcttgatactcaaaatcagctctttttacttcttcatctttttgcattaaataatcagtgtaattgcctttgtaagcttttagttttccatcttctagttctaatatagttgtacataactcatccagaaaacgtctatcatgagatattaataataatgctccctcatgccttttaaacatatcttccaaaagcccaatgctttttttatctaagtttgaagttggctcatcagctattatgatatttttcttattactcagcgcatctgctatttttaacttaaccttttcccctcctgataagtattcttcaaatttatctggagcatttaaaagactcttctccttactatgactacatgtttcaatattattttcactctgacttatataagaatagctttctgtaaggtaagtatatccttcatcaatttctatttcacccaatattgcttttaataatgttgtttttccttgaccatttgaaccaactagacctattttgtcattttctaatatttcaagtttatctatatccaaaattaatttatctgcataatatttctttaaattctctacttttactaacaacataaaaaatccctccttaacacacttaaatataaggagagattctataaataggcataacaaataaacgtatagactataatctactctccttaatttaagcattgcaaataaagccatcaaaataggcttttcaaaaattacaatactttaaattataaaaaatagattatattctcattgtcctagttaccttgccctttctttcatttatttttaatcattatatcaacattaattacaaatgtctatagaaaattaactaattttagttattcaatatacaatttattctttaaatttattcttcttcaactttaaaatcctgattatttaaaattctgtttaatacaattccaacaattgcagctaaactaagaccagttatctttactgtacttgttatagggattccaatagaaatgcctttattagataaatatgttgttccaagacctattaataatataactgctattattaatatatttatcttactttctacacaagaactgtcccttatagtttttaatcctacataagttatcattgaaaatagcattatactaattccacccataactgaacctggtatactttgaagaaatccaccaaactttcctacacatgcaagcaatatagcaaatattgctgtacgtctaagtattgaagggtcatagtttttagttatagcaagtactgctgtattttctccataagttgtattggctggtcctcctaaacaccctgcaactatagtcgcaaatccatccccaagtaatgttctatttaatcctggattttctataaagtttttacctactacagcaccattagtagtcatatctcctatatgttccataaatacagctaatacaactggagatataatcacaattgctcctaaactgaacttaggaactgtaaagttcggtattgcaaataaacttgcttctgtaatagtagttatatctactaaccttaacagtaaacagattatatacccagaaaaaacggctattaatattcctaattgttttataaatcctctaccaaacttattggttaaaattgctattgctaaagttataaatgctattacaaaattagctgaagccatactaaaagctgttggcaataaatttaatcctataactactatcatagctcctgtaacttgtgcaggaaaatataatttaattttatttacaccaactatttttactataatcgacattataatataaattaatcctgctactattataccaccttgagcatatgctaaatctccaccatacgcctctttagctgctagtataactggtataaacgcaaaacttgaacctaaaaaggcaggtacttttccttccgtacaaaaatgaaatatcaatgtaccaacaccagcacagaaaattgcaactgacggattaaaacctgtcaaaatgggaactaatactgtcgctccaaacatggctaatagatgttgtaaagacattattgtttttttcataaaaacctccaaaattattatatataaataaatcctctgtttaattaatatcttttaattaattatcattccctagattctattttttaacctctatatacttattatataatttatcattattttacattttacgacatcaaaaactcaaataaaggagaataaaaactacattaagactcacatccataaaattataatatttattttgtgcaatctatgtaagctttatcctcctccctgactattcaatgctaagcttttatataatacttaaaactaattattctttgattgtaactgaatcttctccatcaatttctaataaactgacagatataatttcatgtctagaagtaggtacattttttcctacataatctgctcttataggcaactctctatgccctctgtccactagaactgctaattgtattgatttaggtcttcctatatctataatcgcatctagtgaagctctcacagttcttccagtgtataaaacatcatcaaccaaaactactgtcttatcatttacattaaaatctaaataagttcctttaactacaggttcaacatgaattttttccaaatcatctctatataaagttatatcaatatctcctgtatctacttttgttccttctatttgttctattttcttagaaattctatttgcaattggcacacctctagtttttattccaactaaaactagattttctacacctttatttctttcaattatttcatgacttattctagtaattgctcttgctattgccttttcatccattaattgagctttttctaccatatcataattattgtcaaagatataatatatctatttgacaaatctactcctttcttttaattttttataaatttatttttatttaaaatttcaatttaaacaacaaaaaacttctcatcacaagacaagaagctcttatataaaaaatatacagtgtaatttagcaattgtcttacgatatctctgtatcgtttaaagataattttttaatctatcaactcaaattatatatttatatttcaaatttttcaagcttttttaaacaaaatactttaatataagatattttatttaaatttcactaaatttatttacttatataaaaacaaaaaatgatttataagtattatacaaatggttattttatcttcttaatagcttccttaaaatactcaggtaattctgaattaaattcgatatattccttagtggtaggatgtataaatcccaacttcttagcgtgcaaagtttgtccttttaatttaaatttagtttcttttggaccatatacaaaatcacctaaaagtgggtgatttatagacaaagcatgaactcttatttgatgagttctaccagtttcaagcctagctctcatatgtgtaaacttatcaaatctttctacaacttcaaaatgagtaattgcattttttccatcctttactacagccatttttaatctatccttaggatttctccctataggtttatcaacagttattttatcttctttaaccacaccatagcatataaattcatactctctagttatagtatgttcctttaactgttctgctagaaaattatgtgcataattgttcttagctatcataagaagaccagaagtatctttgtctattctatgaactataccaggtctaataactccatttattgacgacaacttatctttacaatgatataaaatcccatttactagtgtattttcatagtttccaggagcgggatgaacaaccatatcctggggtttatttattattaagacatcatcatcttcatatacaatatctattggaatatcttgaggtaaaacctctaatactttaggttctggtatctctataacaatattatcttcctctttaactagatatttagctttttctactttattattgacctttacttttccatcttttataattttttgtatataacttcttgacatatcacctaattgttctgctagataaatatcaagtctaacttcttcttcctcttcaagtactaaaaactcttttacttcatccattatatcacctacttttactttcaaaaaataaaacatatatacataaaaacacagttcctacaactacaaatacatcagctacattgaatacatattcccatataactctaaagtcgaagtaatctaccacaaaacctaatcgtactctatcaattagatttcctaatgcaccagatataattaatataattcccaaccttccaaatatatgtactttccttgtattaagatagtataatccaaatactgttgcaagtaatgcaacaattataaatatccactgattattttgtaataatccaaatgctgcacctctattttcgacataagttaaatgaaatacattatttattattggtattgttgaaacatctaccaaattattcaatacccatattttagacagttggtctaagcctatgagtagaattattattaatatatatagcaatgatttttccccctataaattatttaaaaaccaattttatttgaaacacactattattattatacaaaaaaaatgctctaaagagcaactttattaaaattgtattttcttaataaagctagagcaaaatttaaaatagtaccatcttttttatattgcagattgctacatatttaaaatcatattattatgtataaaaaatttaaaaataacatactaattaatactttttgtgtgttttatagattaaagattaatgatgtctgtactttaaacttacaagcaccactaatcttcaaacaaatatttttacttttgcacttgcttatttttatctaaatgttgtataagttcagatactgttacgaatttatatcctctctcttttaatttaggaattactacttctaaagcttgtatagtttgtgatttatcatttcttttagtgttataatcatgtaaaagtattatattaccattttggacctttgtaagaatagtatttataattgtatctacaccagggttagaccaatctctagggtctaagtttgaccaaagaattatattcatgcctttagaaactataatatcacagacacttttactcatggctctatatggaggtctaaatatctttggttctactcctattacactttttataatattttgtgtatctgttatttctttttcaacactaccataactattttttgcaacatttatatgtgtaaatgtatgattccctatttcatgcccctcatcatattgcctttttaataattctttgttatattctactttttctccaactacaaaaaaagttgcttttacattatttttctttaatatatcaagtatttgtggtgtaaaatcctcatctggaccatcatcaaaagtcaatgctagaatcttttcatcctcatttcctttttttattattacatcttcataatcgtcttttatattgtcatttaaagtataggtttcttttgaactattttgattatgtgtattatggttatatgtatatacacctactatggataataaacatatacatataccccatattgctttcttcatgtcattacctcttttctaattcattctaacaatatatgatgtcaggcttctaatctctcaatgttccatttttatttaaatcagttaaatttgttaggtcttctgaataaaagttagaatcttctacatcaggattttgcattgcatcacctaataaagcattttctttttttgcacaattgttacataaatttgtatcaggtaatatatctaatctttctaaatctatttgattgtgacataaatcacaaaacccatatgttccattttctattttagataatgctgaatctatttgatacagtcttccttcttcatgatttattaaactattttgcatattttgcatatataaatccgttcccatatctccaatatgattgtcataactagataattctcctgatgaatatttttcactagtatgtttagtagtgtctccaaacaaggtattatctttcatatctacgactaaattagttaacttttctctttcttttaataatttatctttgtattttttagtatccattttcaacacctctaattttaatatttatatcataaaaatagtatgtggaaaactaaattaaaaatacaataaaaaacaagatttgattttttcaaaaaaaattgtaggtaaacttaaaattcacctacaaattctttacatatatttttaatataatgtttttagtttttgataataattacattaacttgctaatttatgagcattttgctcttttatatccttagcttttttaaaaaataaaagtccaaggattattgcaactacaatacctattccattagatatattaactggaagtctaaatccttcttttgcctgcattatataactaaatgttactacagtcataaaaagtgctggcaatgtagttatgtaatgatttttatttgctttgactaaatatgcagaaccagtccacaacattatcatagcaagtgtttgatttgcccaagagaaatatctccaaattatattaaaatctataaatgtaagggcaacccctacagcaaataatggcaaagctattaaaaatctatttttaactgcatcttgattataattcattgcatcagctattgttaatctagcacttctaaatgctgtatcccctgaagttataggacatgctacaacaccaagtatggccaaagcgcctccaataggtcccattaatccaacagatactgtatttacaacagttgctgctccaccatcattaaatattacattaagctgaggtataccatggaaatatgacatagctgctgctgcccaaactaaagctattataccttctgcaaccattgacccataaaatactggtcttgcctcactctctttctcaacacatctcgccataagtggtgattgagttgcatggaaacctgatattgctccacatgctattgttataaataagtatgggaataaaggtgttccatttggattcatattttgtaaatttatatttggtatgttatacccctttattattaatcctccagctacacctactgccataattaataatgctgctccaaataaaggatatattttaccaatcaatttatctattggtaaaacagtagccataatataataaagtattatcactccaacccatatttgtgcgtttacacctgtcaatgtctttaataatcctgctggacctgttacaaatacaactccaaccaatactaaaagaataacactaaatattctcattgctatttttgcaccatttcctagataaagacctaccaactctgatgcagatgtacctttgttcttcattgataaatatcctgaagcaaaatcgtgtactccacctgcaaagattgttccaaacacaatccacaaaaatgctgatggtccaaataacgccccttgtatagctccaaatatcggacctaaccctgctatatttagaaactgaattaaaaagattctcttccatttcattggcacataatctactccatccctacaagctatagctggagtttggtttttgtcattgattccaaaaaccttttctacaaaagtaccatagataaaataacctactataagtactactattgaacctaaaaagcttaccataaattcatccccttagtttttatataattgctttataaatttttatgagtttaagaaaactatttccagttcaaatagtaatacttttttatgctaatataaatattaattacattaagtgcatatttaagtacatgaaatgactttatatatgcattaacagcctaaattcttttactttgcttctgcttacagttacttcatagtcactattttttaatttcaatatgtatgtattgttaaaccatggtataatttcttttactttggttaaatttacgatataagacctatgtgttctaaaaaatgttttatcatttataagattctctacttctgatatgccttcttttaatataaacttttctttctcagtatatataaatgtctgcctttcattagcttcacaataatatatatcatcaatatctattacaaccaatttatcacctttccaaaggctaattttatgtgttatttcttctatctcctgatttactgtctcttttttatatttatataaattactattgctattagacagttcaatatcactcatctcacttttttctaatttattcaacatagaaataattctctcttcagaatatggcttcagtacataatcaaatacatctaaagaaaaagcatctactgcataattttcatacgctgttataaaaacaattttaggccttgatttaaactgatttaatgtttttgcaagaagcattccatcgagatgaggtatatttatatccaaaaaaattacatctattttattttcctgaataaagtctaacacttctataccattagtaaattcatttactacctctatgctacttttattctcaataaaatatcttaattcctttcttgccggaaattcatcttccactattatagctctcatacttctactcctttacataaaatactatcaaagtcccattgtctgttcttcttatattaagccctcttccatacatcagtttaagccttaaatgtacattataaagtccaatcttattttctggcatattatcttgatatacattatttataatttcctcacttatacctataccattatcctctattgatattctcacagtattttctaatgaataaggtaacttttttatggatattttcactacaccagctctaccactttctaaaataccatgtattatcgcattttccactaatggttgtataatcaaacttggaatctttatatttacatcttctatatcataagatacagttagtaattctccaaacctagctttttctatctctacaaaagatttaacttgttcaatctctttatttatatcaattaagttatcactatattcaagattatatcttagataagttgataaatttattattaactctctagccttatctggactaaatcttataaatgaagctattgtgtttagggaattaaacaaaaaatgcggattaatttgtctttgaagtgcttttatttctgctttatttctcgcttctatatcttttttatctttctcaatcccctctactatagatataacaaatcctattccaatctgtccaacaattaaaggtaaatatatcccaacaattatttgaattgctaaagaatgtggatatgatattaagtatataagtagtatagtaaaactttcagaaatcatacctaccaatataccatacattactctatgttgctttggtatcctcttatatagaaatcctgataatacacctgctagtatacttgataaaagacatggaacagatgttatccccccaatatccataaaatatctatgaatccctgaaaaaactcctgctgtaatacctaccattggaccaaataaaatgccacctgatactatagatattattctagtgtttactattgaccccatataatttataccactataagttccaaatatggctaaaaaagtaaaaactaatgctatacagaccaagtcattaaaactatattcttccttttgaaatatctgcttaaatatttttaactttgttattagaagaaacagtactacaatgaggcttgtcttttctattaatgcgattaaaattgatgttttcatattccacctttaaaaaataaatttttacacactctaaatttattatgtttgttgtaacttatatatttgaagtaatcctatctcgacattttccacatttaaccttttaattaaataaaaaatggatatacttctattaacaactaatactagctgactaacacaagcttgtaataacttgtagttatcattaactctacaattctagtatttaattttatactttagaaatctcttttcttagaagtaatactttcgaatattatataatacaatgttatgtagattcttactcatacaacatatttctttaaaaattttatactattctttgttcaaatatctcatttgatttaattgtgctaaacacacattatcatctctctgttatatatttattatatagccgtatatcgataaagtaaataaatcctatatttaaaatcatatgtttgatagtaaatcattataatgtatatttaccataataatttgccaaccttgaaagtcacttctataattagaagttaaataattcttctaaaaaaaatacctctaaattttattttctgaaatacatagttataactatttttatcacgtataagaataaaaattccagaaaatttttattatctaagttaatataaaacatattatttaatataaataaattttttataataatatattgatttaatttactttattattgtaaactataagtataagatatactatataaacaagcataaatataccttaattctaactatccttaattttatttatctcctagtgttattttacgtattttttataaaatacttttagtttttttacttttgaattttttataggagggtatttagtggatatattaatttttgataacgatgttataagattatattataatgcaaatttgttattaaaagaacttactgaaaaaaataaagtaaaaatatattttatagttgtagatgcaaaatacaagataagtaatgaattatgtgatggattatggatagcacaaaaaattagagaatcagattatattagtccaatcatatttcttacaaatcatatagaaatgattttagggatcttcgattataggttagaagttatggactttatattaaaacatgatatggaaattgctgaaagtaaaataaaagcttgtattaaaattgctcataaaagatacgttaaagaaaaaaattatcgctctaatttttttactatctactcagattcctcactatggaaaatttcatttgatgaagttatatattttgaaacaagcgctattccacataaaataaaattagtgactacttcaagaatatttgaattctataaaagtttaaggtctttatcagatttagatgcatgctttattcgtgtacataaatcttttgtagttaataaatatcatattgtttctctcgacctaaagaaaaataatattaaaatgagtaatggccatatatgtcgtatatctaatacatatagaaatattttaaagaacattattaaaacataataaatagaaaaaagagatgtctcaagataagaatttgaaccatctctttttttatacaaaaaaagtagttcctaagaatcctctatataataatcgttttgtgaaaaaacacataatgactatatcatatacaatttctattagacattgcaaccattgttcctagattatgattcaacaagatagctcattaaatcataaaagtatgaaatagtctctttaaaatattcagttgttattttgtactgacatatcatataaatacatatttttatgatatatagttacatattttatgaaatttatataaaaaattcttatttagattatataatctaaataaattaaagttcaagagttaattaaactaatattgggagggagaataaatgaaaaaatttaggaaacataaaaggattagtaattgtatatctatattgttgatattatatctaactttaggtggtttgttacctaataacatttatgcacaagacttacaaagctatagtgaaaaagtttgcaatactacttacaaggctcctatagaaagaccagaagattttcttaaagataaagaaaaggctaaagaatgggaaagaaaagaagcagaaagaatagagcaaaaacttgaaagatctgaaaaagaagcattagaatcatataaaaaagattctgtagaaataagtaaatattctcagacaagaaattatttttatgattatcaaatagaagcaaattctcgagaaaaagaatataaagaacttcgaaatgctatatcaaaaaataaaatagataaacctatgtatgtctattattttgaatctccagaaaaatttgcatttaataaagtaataagaacagaaaatcaaaacgaaatttcattagaaaaatttaatgagtttaaagaaactatacaaaacaaattatttaagcaagatggatttaaagatatttctttatatgaacctggaaaaggtgatgaaaaacctacaccattacttatgcacttaaaattacctagaaatactggtatgttaccatatacaaatactaacaatgtaagtacattaatagagcaaggatatagtataaaaatagataaaattgttcgtatagttatagatgggaagcactatattaaagcagaagcatctgttgtaagtagtcttgattttaaagatgatgtaagtaagggggattcttggggtaaagcaaattataatgattggagtaataaattaacacctaatgaacttgctgatgtaaatgattatatgcgtggaggatatactgcaattaataattatttaatatcaaatggtccagtaaataatcctaacccagaattagattctaaaatcacaaacattgaaaatgcattaaaacgtgaacctattccaactaatttaactgtatatagaagatctggtcctcaagaatttggtttaactcttacttcccctgaatatgattttaacaaactagaaaatatagatgcttttaaatcaaaatgggaaggacaagcactgtcttatccaaactttattagtactagtattggtagtgtgaatatgagtgcatttgctaaaagaaaaatagtactacgtataactatacctaaaggttctcctggagcttatctatcagctattccaggttatgcaggtgaatatgaagtgcttttaaatcatggaagcaaatttaaaatcaataaaattgattcttacaaagatggtactataacaaaattaattgttgatgcaacattgataccttaatattttttcacataaataatttaatatttttcaaatttaaggaggagaaacaatgaaaatacaaatgaggaataaaaaggtattaagttttttaacacttacagctatagttagtcaagcactagtatatcctgtatatgctcaaactagtacaagtaatcattctaataagaaaaaagaaattgtaaatgaagatatactcccaaacaatggattaatgggatattatttcacagatgagcactttaaagatttaaaattaatggcacccataaaagatggtaatttaaaatttgaagaaaagaaagtagataaacttctggataaagacaaatcagatgtaaaatctatacgatggacaggaagaataattccttctaaggatggtgaatatacattatcaactgatagagatgatgtcttaatgcaagtaaatactgagagtactatatcaaatacacttaaagttaatatgaaaaagggtaaagaatataaagttagaatagagctacaagataaaaatttaggttcaatagataatttatcatcacctaatctttattgggaattagatggtatgaagaaaattataccagaagaaaatttattcttaagagattattctaatatagaaaaagatgatccatttatcccaaataacaatttctttgacccaaagttgatgtctgattgggaagacgaagatttggatacagataatgataatataccagattcatatgaacgaaatggatatactattaaggacttaattgcagttaagtgggaagatagttttgcagaacaaggctataagaaatatgtatcaaattatttagagtcaaatactgctggagatccatatacagattatgaaaaagcttcaggttcttttgacaaggctataaagactgaagcaagagatccgttagttgcagcatatccaattgttggagtaggtatggaaaaattaattatatctacaaatgaacatgcctctactgatcaaggtaaaactgtttccagagctactactaacagtaaaactgaatctaatacagctggtgtgtctgttaatgtaggatatcaaaatggattcacagctaatgtaactacaaattattcccatacaacagataattcaactgctgttcaagatagtaatggagaatcatggaatactggattaagtataaacaaaggagaatctgcatatataaatgcaaatgttagatattacaacacaggtactgcacctatgtacaaagtgacaccaacaacaaatttagtgttagatggagatacattatcaactatcaaagcacaagaaaatcaaattggcaataatctatctcctggagatacttatcccaaaaaagggctttcacctctagctcttaacacaatggatcaatttagctctagactgattcctataaattatgatcaattaaaaaaattagatgctggaaagcaaattaaattagaaacaacacaagtaagtggaaattttggtacaaaaaatagttctggacaaatagtaacagaaggaaatagttggtcagactatataagtcaaattgacagtatttctgcatctattatattagatacagagaatgaatcttacgaaagaagagttactgctaaaaatttacaggatccagaagataaaacacctgaacttacaattggagaagcaattgaaaaagcttttggcgctactaaaaaagatggtttgttatattttaatgatataccaatagatgaaagttgtgttgaactcatatttgatgataatacagccaataagattaaagatagtttaaaaactttgtctgataaaaagatatataatgttaaacttgaaagaggaatgaatatacttataaaaacaccaacttactttactaattttgatgattataataattaccctagtacatggagtaatgtcaatactacgaatcaagatggtttacaaggctcagcaaataaattaaatggtgagacgaagattaaaatccctatgtctgagctaaaaccttataaacgttatgtttttagtggatattcaaaggatcctttaacatctaattcaataattgtaaagataaaagcaaaagaagagaaaacggattatttggtaccagaacaaggatatacaaaatttagttatgaatttgaaactactgaaaaagattcttctaatatagagataacattaattggtagtggtacaacatacttagataacttatctattacagagctaaatagtactcctgaaatacttgatgaaccagaagttaaaattccaactgaccaagaaataatggatgcacataaaatatattttgcagatttaaattttaatccaagtacaggaaatacttatataaatggtatgtattttgcaccaacacaaactaataaagaagctctcgattatatccaaaaatatagagttgaagctactttacaatattctggatttaaagatattggaactaaagataaagaaatgcgtaattatttaggagatccaaatcagcctaaaactaattatgttaatcttaggagttattttacaggtggagaaaatattatgacatacaagaaattaagaatatatgcaattactccagacgatagagagttattagttcttagtgttgattagtatcaaatgatttaaatttgtccccacaatacaatatatatttaccttataaagtactaaaaaattaactttataaggtattttttatttaaatattctcttcttctaacatattcttttttagaactatattgtattataaagataattatctgtatcatatcacctatatataaacataaattcatttaattatataaatttaaaaaatatttttttgatatattattgacaatttccattataagagttaaaattaactcataaattacatattgggtataaaatacaatgtatgttagaagttgtttcagaaggctatggttttctgatttttttatgctcagtagtgatatgcaaaaaagacaaagttgacatcagttaacttttacctttattctactttccccaaagtaagaataatctaacccctttgagatgagcaaaagctcatctttttttattatcaaaagatgctgtctcaaaatagagataatcctctttttcattgttgaagtgattaaaatatattttatttcatacaaaaaagagtgtctcatgaacaaaagttcactttgagactctctctttcatatcatatacctttttaataactttaaaatttatttatcaagtaaagatagctaataattagtatcttctctctataaatccaacttttttataaacttttctaagagtttttctagcttgtttttcggctttttctgctcccatactatatattttttctaaataatctttattattaagaaggtcaacatatttttctcttataggtcttaaagcttctgatactacttcagccacatcttctttaaatatgccataaccctttccttcatacatgtttacaatctcttctacactctttttacttaaattagaatatatatcaattagatttttaatacctggttgttcatcattgtattttacaacacctaaagaatcagtaacacttctttttatctttctctttatagaatctgaatcatctgctaatagtataaatgcattttcatttgaatcggatttactcatttttttagttggctcttgcaaactcatcactcttgctccaccttttgggtagtatccttctggaactacaaaagtaggtgaaaatctattattaaacctatttgctaaatcacgagctaattctaaatgttgtttttggtcatctccaactggaactaggtcagtttgatacaacaatatgtcagcggccataagaactggatatgtgaataaacctgcatttagatttgcttcactcttttgtgatttatctttgaattgagtcattctacttaattcacccatataagtcatagtattcaatacccacataagttcaacatgctctttgacatgtgattgtataaatatagtatttttttctgggtctaatccacaagctatatattgagcaagtaattctatagcattcgctcttaaaactttagggtcctgaggtactgttattgcatgtaaatcaactatactataatagcaatcataattatcttgaagttcagtccagttttttatagctcctaaataatttcctaaagtcattttgcctgatggctgtgctccactaaatataacttttttttcactcatttttttgtacctccttatatatttatattgattttaacatatttaaaactatgtctttagagttattggcagcatcatgtacaaatacatcataagtaacatcagcacttccatctgccttatcagacattgctcttattattacgaatggagtattatttaaatagcatacatgagctatagctccaccttccatttctccacaatatccaccaaaatcatttactaattcttcttttaattctttagaatttataaatttatctcctgtaactactcttccttttaatactttatgagtctttacttcttccacagaagatttgtaagcagcatctataagtctttcatctgctttaaatacagaagtcttcattcttggtataactcccttagggtctccaaatgctgtagtatctacatcatactgtatagcatcagttgatattactatatcattaacatcaagtttttcatttaaagctcctgcaacacctgtattaacaatagcatcaaccttaaattcgcttattagtatctgggcacaaagagcagagttaaccttacctataccacactttactaacactacattcttacctttcaaaattcccttataaaattctaagctagctttttttatagtctctctaatatccattaaatcaactaaaatactaacttcttcatccattgcacctataattcctattacgttcatttttcctcctaaattttctatattaaaaaatccgtcctaaatcaataggacggatatattttccgtggtaccacctaaatttatatacactcaaaactgaatatatatatcttaatatatgctataacgtgcatacacgatatcaaatactctgtaatcttaaattacatttcattttactcctcaaagacccattcaataaatactttttattaagttctcagcatccttaattctctgtgcaaaaatatatttatttactatttcttatctcaggatttaatttattaatttctttattttataatattccttacactataaattgtcaactatatattataatatccaaaagaaatttttaaaatacattttatttagctgttttcttttcatatctattccataaccatagaccagataatataactagaagacctccaccaatcatctctatctcatatataacattttcagcaaatgtcggcataactggtgctgcagataataatataccaactacagttacaactaaaaccatttttgctaaacctaggcaagtacttgttgattttgccatagtataaggtctaatttcatctggtctctcttttcttagtttaatataagaagcatataataatacatatgggaataatgcagttaatgctgtcatagttacaagaacattgtatatagcatcaacagaaggcattaatgtagtcaccaatagtattatagtaactattattgcttgaagtataactgctttagaaggtatcttgtgttcatttacctctaccaaactatctggaaatattccttttttaacactaccaaataacatttttattggtgatgctatataaagaactattgctcctaatactgagaaagctataccaaaagctattaattgaaccaaccaagaaccaattcctaaagacgtacaaacagcagaaagtgcatctaatacacctttagaagcagtaatttggtctggtggtattatcattgttattgcaattgaacctaatacatataatgaagctactattccagctgatattaatattgccttagggaagttcttttcaggcttatctatttctgttatgaagttagcagcagtctctgctcctgctaaaccaaacattatagctgatatagcaacaaatgcatccatattaagttttggagtcattgaagctattgtatatgtagaagctatatcatgttttttcaacataaatactgctacaaatgaaaatattataagtatagcacttggtattgttgaacctaatgcacctgtattagtaaatatttttgtaaaacttattcctttagttgctataagagataatgcccagaatattattaaagataatataagtacaaacatcttattatcagcaagagctggatttcctattgtataagaaacatttactgctaagaaagttaaaaatgaagaataccaaaatattttagctgtccagtttaaccaagaaactaaaaatccatacttttctccaaaggcttccttaacccaatcgtaaagacctccatcacccttttgatatgtagaagctaattcagcgcaaattaaagctcctggtacaaagtatataaatgagaataataaccacataggtattgcacctaatcctaaaccaaagcttgatgctgtagacttagctatccatcttataccatataaagctgatacattcataaataccaaactccataggcctatttttttcttttccatcctaatttcatttcccctctctattaattattttaaatttaatttcaaaattaataaaatagattcattattattaaactgatatttttcaaaatatttgcatattcaaaaacagttttaataataaaccttaaatactttgaaatcaaatcttattaaaaatgataaatttaaaagttttaccactttaattctaatgatactaaatttttaaaattgtttcaatattattttattataaaattttatttattatttttcattagtatataaaaagataaaatacataactttatagacttaatttattacttttatagaattttcacaataaaaagtcattttacttccgtatttaatgcaaaagtagagattaaacttaatataaaaaatatataacaaactttttttatatttctagaagaaaagtatactcttttttgtttaataatgctaaaattgatttgtattgaattttgattaggaggaaattattatgaaagctcaaagattaaatgctgtacttgaacaaatgaaaaaagatgatatttctcaaatgttagtaagtgaccctacttctatattttatcttacaggagtactaatccatccaggtgaaagattattagcattatacttaaatttaaatggcaataataaattatttataaatgaattattcccagtttcagaagatttaggtgttgaaatggtttggtttaatgatactcaaaatccagtagaaataataactgaacatatagacaaaaatgctactatgggtgttgataaaaactggccagctagattcttattaaacttaatagaattaggtggaggaagtaagtttgtaaattcatcttatataatagatactttaagaatgtgtaaagatgaagaagaaaaagagttaatgagaatagcttcaaaattaaatgacaaggctatggaacaacttaaagctactgtttctggtgaacttacagagaaacaacttgttggtaaattatctaaaatatatgaagacctaggtactgatggattttcatttgaccctattataggttttggacctaatggagctaatccacatggtgaacctggaaatgcacttgtgaaaccaggagatgcaataatattagatataggttgtataaaagataactattgtgctgatatgacaagaactgtattctataaagaaatacctgaaaaaggtagagaaatatttgaaatagttcttgaagctaataagagagctgaagctattgtaaaaccaggtgttagattctgtgatatagatgctgctgctcgtgactacataactgaaaagggatatggacagtacttcactcatagaactggtcactctataggacttgaagttcatgataaaggagatgtatcttctataaatacagatactgtacaaccaggaatgatattctctatagagccaggtatatatttaccaggtgagttcggagttagaatagaagatttagtacttgttactgaagatggttgtgagatattaaacaaacatgacaaagaaatatgtgtagttggttaattctaaaatcaatttgataaaattaaaaagccatataaaaatgttttaaacatttttatatggctttaatttctcaatctatgatttatttcaatccattatttatattgcagttattaagattgcaccctttgaagtatatgtccccatcactgaaccaatttcacagattacaacatctttgtattttacatccttttccataacttcccttaccttttgagccttttctgggcaattagcatgtcctataaataaaaccttttcttctttatctttaatttttgactctactaaagtaatcagctttttcaaactgtttccttcacctcttgccttatctataggagttacaacgccatctgcaacttgtattatcgccttaaaattcaaggtatttataatttttcctgctattggatttattctaccacccttaatagcattttctaaagtttcaagtgttccaaaaaatggaggattatctttatatttatttattattgaaacaatctcttcaatttcttttccttcttttattaatattgctgcttttaacactaattgtcctattccaattgacccactaagtgaatctataacctcaacttttttgttatttccttccttttcaaacatatcttttgctaaaagtgcactattataagtcccagataatcctgaacttatattaatcaccaatacactttcttcctgacaatggtatgcttctaaaaatttatcaggagaaggacatgatgtttttggtagtactttactctcactcatttttctatagaaagtttcattatctatttcctttccagatatataactttcttctccaaaagatacatttaaaccaacaacttctatgttgtatttttctattatatcatcaggtaagtcacatgcactgtccactatcaattttattttatccatattaacctcactataagatattattttatttattcagtcggtcgtacgaccgatttaattattattttatatattgaatgaaaaaaagtcaatagatatagattctcgctttattgacaataaatattcataagcttataatgttattaatttgttataaatatacatggaaaggtaggttttatgaaaacaaataatatgaaacaggctattttatcatctgcaaccaatttaatagccaaaaatggagttcaaaatactagccttgctgatattgcaaaagatgtaaatataagtaaaggtactttgtattatcactacgcatctaaagatgatattatatatgatattgcggatactcatttagaagttataactagtgctatactaaactgtgtaaaaaatgtcaaatcaaaaaattctcaaatagaaatggttaacttaatcttagagaaaatatctactatagaaagtcgtggtagggtacatatgtatcttatttgtgaggcaattacttcaaataatgatttaaaggaaagaataagattaaaatatattgaatggagaactactcttaaatctgaaattgttgaatcactagaaaaatataatagtagcgaaaatgaacaggatgctgaatcattttcttttttactcatgtcaatagttgatggtttagttgtccaaagtttattaaaaacagaaaaaataccttatgaaaatatagcttcttttttagttaatcattggatttaaacttaatacttagataattaataaaagtgaactatttaagttatctactttaacagttcactttcttatttattctcaataatttttacttaaaacattcaatttttatttaaaccttcatggaatcacaaaataaaaatctcttataaatttaaaatgtttttatttatgttcatgtgtatgcccatctgaatgttcatgaccatgtgtatgtgtatgctcatggctatgctcatgagtacctgaaaaaccatcatcatgattatggtcgtgacctacaccatttacatgctcatgttcatgcccatgactgtgagaatgttgatgtgaatgttcatggttatctcctccacagcatccttctcctccagtcccacaacacccacttgtatgtggattatgatgatttcttactacaaatctctctcttaacataattcttatacctcctagtatattattgaatacttcatgtaccccattaactacagtatacatctaactaggtataatctcaatacatatggcattttttaacatatataattaacatatataatcttaaagaaatttatccttaaaacctccaccttttacttcttcaacgttattgacagaaataaaagcttcactatccatatcataaattaaatctttaaatttacctatttcatttgcagatattatgcaataaatcatctttttcttattttgtgtatatgcaccttctgcctccaaaaaagtgactcctctacccattttattcattatcactttggatatttcatcatatttatttgatattaaaagtatagatttttttctatcaaagcaatcttttcctatatccatagtaaaagaaattatatacattgtaattaaagtgtacatcaccaatttagctccaaataagaaagctcctgcacatactacaaaaaaattaataaataaaaatgtatttttcataggtatatcatactttcttttcattatggctgctattatatcaagtcctccagcagtagctcttgctttaaaagttaaccccatacctataccagttaatgcaccaccataaatacactgtagcatagtatcatctattgggaaatatttagcaatatcttgtgttagccccagtgctagagaaaacagtaacatattgacaaaacttattagcaaaaatttattatcaaaatactttctagctataataaatattggtatgttcatcaagaaacttgatattccctgatttataccaaataatttgtataatataacacaaattccagctactcctccacttaataacttggctggtgctagatataaatttattcctaaggttgatagaatcatacccaatataatcagaccatattgtaaaaatatgttattctgaacctcccatgactaaagtcacagggttcctgcttcatagaattttgcatactaaaatatgtcttactaattctccacaagctatccccgtagttcctacggttcttacataagttatttattttgaattgttattagtcttaatccttcttttaatatatttatgcttgcatttatatctctatcgtgagtttcattacaactaggacaaatccattctcttatatttaaatccttaacttcctcgtttttatacccacatttattgcatatttgtgaacttgcaaagaatttacctacctttacaatttgtctaccataccaattagccttgtattctaattgacgaacaaattctgaccatgacacatcagaaattaagcgagatagtttacgatttctaatcatattctttacttgtaaatcttctatgcaaataatatcattctcttttattaatttagtagatagtttttgtagaaaatcctttctttgattggctatatgttcttgaagtctcgcaacttttaatcttgctttatttctatttaaactatcgattgtttttctcgataattctctttgtaatttagcaagtttgtttaatgacttcttaagatacttaggattttctataaagtctccacaacttgagatacaaaattctttaattcctaaatctaaacctatctgattattagtattttcaaatacttcaatatctacatcagtacagcataatgatacataatatctaccacttggttctttagatatagtagcattaagtattctaccttgaggtacttgtttatcccttatcttaaccataccaagtttaggtagttttatatattgaccacaatacataatgtttccatttgtaaagttagttttatatgaaaatctattaattttctttgatttaaatttaggaaatcctgctttttctttaaagaattttttatatgcattatctaaatcttttaaggcgttttgtagtgaaaatttgtcaggttctttaagccattttaattctttttttaaattggtcaaatcagaactacactgtttataagtaaaagtttctttatcgtttttataaacttctattcttttagcaagatacttattatatacaaatctacaacatccaaaagttttgttaattaactcttgttgttttttatttggatacattctaaacttatatgccttttccactactatcacctcactctaattgttttttgatacacattttaatgattttatcatatttaatatattatataatgctgtgatgaacaatttattaatcacctatcataatattaacaaatgtaattatttaaaacaattatttagaaggttttatatttaattttaaataacatatttaagaaccgtaagtcttaacttttatcatttttgaggttgtcgttcacataagttcgctactacctatgcagttctcttatgaacttcttacactttcacgtaagcacagactatatcttatccttcggcattatccgttaaggtctacccacttccactaccaatagcttgtagtgtacttccctcaagaggaatagtcgttgaagtttctcctattcggagtttacctgctgattgcccattttaaagtacttagggtttaaccttataccatctaaccaattttttctactttcgtaactttcacacttaggtttatttcatccttatgttttagtttggttagctttaggggtttccagcaattcaagtagtattggataggttctatcctatctctacatataggtttccctatatgctgactattttagctactaactcatgactaaattcacgagtgtgcgtagctattttttaatcaatacttaactttttgttttcaccatacatcaaaacgcacccctttgcataataaataaaccaccctgcagaacacacgataaatttataaataaatttatcagaagtagcttactaaaaatattattcatcctcacttaaacgtttattcattaatattctatcacatgacataaataatttatatgatttatatagatttatttattgtaaattttggaatattaaaacattttattgaatagataattatattacataaaaaatccctatagaaatctataaactaatttctatagggattttggttaactaactattctttttatttttttataacttttatacctgtcatatggtcatttaagttttgttcctctaaagatttatcatctactctgtttatttctaaagctaaagtttcagacttgatatattcattaaaatggtcaacagccttagcaatttcatcatcaccacagtattctattactatattatctaatacttcaaagttattagattttcttaattgctgtactttagatataaattctctagcataaccttcattaatcaactcttcagttagcttagtatctagtataacaaaaagattgttttcaacagatacattaaatccttccttagcagttatacctattaatactaaatccttattaaattcaaaagcttcgccatctaaatcaactgttaaagtctcacctttttcaagtttattagcagtttcatgagcatttaatttacttaatgctccaacgaataaattcatcttagaacctaataatggccctgcttccttaaagtttggttttaaactaaagttcatatactcatctaaatccttagcaaatattacctctttaacattaagctcttcttttattaaatcaactacatcacttattgtatcttcaaacttaccatctactaacactttttgtaatggttgacgaacttttattctttctacttctcttgaagctctacctaaagtaactaagtttttagctaaatccattttttcttctaatttagtatctactaactcttcattacatttaggatattcagctaaatgaacagatacttctcctgttaagtttctatacatttcttctgacatatatggtgcaaatggagctatagctctacaaagaccatgtaacaattcataagttgtattgtacactgcttttttatcttctgttaattcagttgcccagaatcttcttcttgaacgtcttatataccagttagataaatcatcatttataaaatcttgtatcatccttaaagttttatttaactcaaatatagctaaattttcttctacatctttcattaaattattgaacttagataatatccatctatcaagttctggtctatctttatattctacaaaaaattcagttggatttatatcatctgtgtttgcatataaagtaaagaagttatatacattcttcatagtacctataaatttactttggatttcttttaatccatccatatcaaatttagttggagtccatggtggagaaacatatagtaaataccatcttaatgcatctgctccatattggtcaaacaattccattggatttactgtatttcctcttgatttactcattttcttaccatctttatcaagtacaaggtctggaactaaaacactcttatatggtgcttttcctaatacaaatgttgatactgcaagtaatgagtagaaccaacctctagtctggtctataccttctgatatatagtcagctgggaacaattggtcaaaattttccttattttcaaatggatagtggtgttgagcaaatggcatagccccactatcaaaccaacagtctataacctctgttactcttgtcattggttttccacatttttcacattttaagtgtatatcatctacatatggtctatgaagttcaactgtttctggatttacatcttctatagctttttcagctaattcagctcttgaaccaactgaatctgtatgaccacattcacatctccatataggaagtggagttccccaatatctagttcttgatattgcccagtcatttagattttctaaccagtttccaaatctcttctctcctacaaaacttgggaaccattttacaccattattattttctattaatttatctttaagtttagtcatctctatataccagcttggttttgcatagtatactaatggagtttgacatctccagcagtgtgggtaattatgaactactttttctttgctatataatttattttcagaagctagccattttattatttcaacatctagcccatcttccattacaaatctaccttcccaaggagtagatgtaaatttaccagtttcatctactggttgaataactggtaaatcatatcttttacctgtgttgtagtcatcttcaccaaatgctggtgctgtatgaactataccagttccatcttcagtagttacataatctcctactgtaataaaaaatgcttttttgtcaacttctacaaaaggcattaattgttcatattctaaaccttctaggtctttacctttcatttcttctaaaacttcataatcttcacctagtactttatcagctaaaggtttagatacataatatacctcatcaccttttttaacttttaaataatctacatcagcatttactgttaatgaaacatttgatggtaaagtccatggagttgttgtccatgctaagaagtattcatcagcatcttttttcttaaatttagctataactgtattagtttttacttctttatatccttgtgcaacctcatgactagcaagaccagttccacatcttgggcaataaggaagtattttatgcccttcatatatatatccttctttgttgaatttgtttagtatccaccatacagactctatatagttattatctaaagttatatatggattatctaaatcaacttcataagccattctctcagtcattattctccattgtttttcaaatgagaaaactgactctctacatttttggttaaattcagctattccatattcttctatttgttgcttgctagtaagacctaactctttctctacttgtatttcaactggtaatccatgtgtatcccaaccagcttttctctttacttgataaccagacattgttttatatctacaaactgaatctttaagcgttctagataaaacatggtgtactccaggatttccattagctgttggaggtccttcatagaatacgaaacttgggtcatctttccctttttctaaagttttttcaagtatatttatgtctttccaataatcaaaaacttgtgcttctgcttgttttacagaactgtctaccaatggcttaaatttcgccatgtaaatcaccctttcctactaaatattataattccaaaattttttattctttcacataaatttaaatactaaaaaactcgccccctttaaaccaaagggacgagttataaatcgcgttaccaccctaattctatatgtaaactaaatactagctacatataacactctaatagtataacggtactaaccggcacagcttagtagaatttaatcgttcagcctgcagctcaagagtgatttttatctttataaattcattggttctcagcatacccaattctctgtaaaattatctaaagataaatgtctctatcaacgcttttaaaaatttatctgtgtttatatgaaattttataacaaataatttgaatagtcaatatatttttgaaaaatataataatttctatttttcttacatttttatcctatttttaatctttgttatagatttctcaaactcacacagttattctacataaaaaataaacaaattacaagcttattctaaagttgtagcagcttcatcattactataattatacactgttgttccttcaaatgcatttacacatttttcatctacatcataaaaaatctcatcaacacttcttatttcatcttctaacagtgatttaaatttatttctaaatatcttaaattctttgactaaagcatcatactcttttcttatctctatgacacggttattagcttgttctataatttgtctagcttttaaatcagcttcttcaacaattatcttagcctttttattagccgcgctacaagtgtcttctgctgcactttgagcagttattaaagtagcttttagtgtttcttcaatattttcatacttgtttacttggtcttgatataaccctaatttttctttaagagctgtattttccctacatagagattcataatcttccttgatgatatctaaaaattcatcaacctcttcatctctataccctcttaaaccttttttaaactctttattttctatctcaattggagttagcattacatttcctcccagctataatttaaattagtccttatacaattaatcttgcttgaacttttatttttccttttttggtaatatctcctatttgtgttaccttagctcttcctttgcctctaatagaaatcaaatcatcattttttactattttagaagttgaagttatcttttcataattgacatggactttttctccatttatgtattttgcactatcttgtctagatatattgtaaataccacttatcacacaatctaacctatctgaagatactgtaaatgatacttctttatattttgaagaactattaacaatattttctctggaaatttcctttacaattacattatttcttgaaaccttttctaagtttacaattataaaatcgcaaatatcactacttacaactacttgacaaaagctatcatgtataattatatctccaattttttctctttttatacctagacccagtattgaccctaagtaatctttatgagatatatttttaaacttgaaattcccttctatttgtaaaaatctaagagtatcttctatatcttcatattccatgtaaaatggataaataaatacagtgcttctttcagcttgttcataacctccatccacactgtattttatttcatttgtagaatttaatattgctacagcatttttcacttcatatggattaagaaactccgtagacttaacatcatagttttttatacaactattagccttgtctatcactttaaacattttatttttcaagtctatatcctttatgtgatttgttagttttaatttatccatcctatcaccttagaatataaccaatactaattgtcttaggaacatcaataatactattgcaattaaaggagaaaaatctataggtccatttgtatatttatacattatagaccttattggcccttctattggctctgtaagattttccaaaatattaaaaattttactttgtcttccatttggaaaccaagtcatcaagctttttataactatcatccatgctattatatctaaaagataataaagtgcaattcttattgttcccatatattaaccgcctttttactatttattttgccaagggaagaatgctttactttctaattcttttttcatatttgcatctatatccacattattaggagctagtataaatattgatttagaaaccttttgtatacttccatctaatacataaactgccccattcataaagttaaatatagatttacgaacttcagaattagtcaatccttccaaattcactataactgcccttctttgttttagatggtctgctatagttgcagcttcatcataaaccttaggttcaactattacaactttcatttggctagttgtatgtaaatttacaattttatttgcttttgcagtactaaagccactgttcatttcttcttcttgaactatatcgtccatgccactttcatattcatcttcaatataatcttcttcttcatcaactatccaattcttaaatttagatattattccatttgacattattaacttcctccttaaaatttattcaaatttgagtaattattttttattgtagtttctttctccaaagattgatgttccaactctaacaatggtagccccttcctctatagcaatttcataatcgtgactcattcccattgacaaaacatccatccctacattagggatgtttagttcttttatttgttttgataaatctttaagacctttaaatacacctcttatctcatcttcatcttctataaaaggtgccattgtcattagaccctttatttttatatttttatatttttctgacacttctttgacaaaatctacaacttcttctctatcaagtccatgcttagactcttctttagatatattcacttgtactaagcaatctatttctctgtttatttgttctgcacgtttttgaatttcttcgcataatgcaattctatctaaagagtgtatcatacaaactttatcgattatgtacttaactttattggtttgcaaagttcctatcaggtgccagtttaatttgtcacctataatatcatactttctagctaattcttggggtttattttcaccaacagaagtgattccttccctcattgcctcattaactaagtctacatcaacagtctttgtgactgccaaaagggtaatctctttgctgtctctatctactttttttgcagctttatcaattttgtttcttatctcagacaaattatctttaatagaacccattattatcacctactttatccttatatttgtgtttatactgttaggtcttaaaattattttgtcatatagattaacacttgtaactccatttatgtcatttttataataatccacaaatacagaagattcattctcataagttattccttctaatatgacaaattttacactttgtgattgttcatcaattacatatacaccacgtttattgtcttttgtttttatagaagttttaggtatttttaaacattccatctgattatatattatatcaaattcttcgacacttgtatcctgatttgcaacaatttggttacttatttttaattttaccattattttattattattttcatatattttgtaaacttttgcatctaatttttgctcatgatattcaattattacattttgatttttttcaaagttattagaatcttctttactgatgtatgtagatagataattactttggtcattggcatctttttctatagttccttttacaggaatctttgcatcaactttttcattttttaacaccaacgtatctacatttttgctaattatcattactaatatattaaatactaaatatataagaataccaagtatcactaatctggtatattttacctttttcaaagactctccccctataaaattactttcattataagtacttcttctaaaaaatgtttattccttttttataagctaatattttacgttctaataattattttttccatattaaatttattttttatcaatcttcctatacaagactgcattatttatatataattgtattataaagtataagtttaatttacattttatacattaagcttactttatatgtttttatagttatttttatttttagatgcaatataaaaccaattaagatttaaaataacttttgttatgttgacatttatttaggtaatcatttacgaatcgggataacgttatcataacaaaagtttatgtcctaaaaaaaatacaaggaggattttcttatgtcagaaattttattaggaacaggtttacttttattggttctatgttgtttcacaatttttagttacaaggccccatatggtatgaaggctatgggagctctagcaaacgctgcatgtgctactttcttagtagaggcattcaacctttctttacttggtgatgttttaggtatggaattttttagaagtgttggagctgctaatggtagtcttggtggagttgctgctgctatacttgtgcctttagccttaggtgtatctccagtttatgcagttttaataggattatcttgtttagatttttctatattatctggattcgttgctggatactttgtttctttcttaattaagtttatagagaaaaaagtgccacctggagtggatttagtggttgtaattcttctatgtgcaccgctatctcgtcttatagcatcaaatgtagacccattagttaatagtacactactacaaattggacaagttttgatagaagctaccaacattagccctataataatgggaattatactaggaggcataataacagtagttggaacgtctccacttagttcaatggctcttacatctataattggtcttactggtcttcctatggcaataggagcattaggtgcttttggttcagcttttatgaactcaacactatttgcaaaattgaaattaggttctaaaaaagatattatatctgttgctattgaaccattaacccaatcagacataatttcagctaatccaatacctatatattctactaatttctttggaggagccttttctggtatcattgtagccttgatgggtcttgtaaacatgacaccaggtacagctacacctgtggctggttttgctataatgtttgcttataatccagttcaacaagttcttataacagctggtttatgtgctttattcaatgtaattgcaggatttttaggttcaaaaatattcagtacctttaaagttcttactgctggtgaaatacgtggtactgatgtagaagaagaaattgcttaaaaaacaataagatttataaatttatatctcaagtagtagagttttatattgtaggcaattttattaattgcaaacgttttattttttatttatgtttatgattattatgtgtgttgaatatttagataaatttttatttattatttttatttagatttttgtttagttttttatttggttgatatattaggaataaaaattagtatagtttattattagttagatagcataactttttagatacataaaaaattttatattaattagatattattaaaataaaagcgatacatgaatttttaaatgtccatgtatcgctttatttttgccataatcttaacaactgatttttaaagtttattatcttaacgaagttcattatcttatataatatttaaatgcatagacttctttaatttaaccatctaaatatttaattaaatattattatatgtaatataactaatttttaaatgaatgtataggagctggaatccttcctcctctttgagtaaataattcagatgaatttgtacttataggcattactggtgctcgtcctaaaagtcctccaaattctaccatatcacctacatcacatcctggggctggtataattctaacggctgtagtcttattattaatcatacctattgctgcctcatcagctatcatagctccaagcgtacctgctgtagtatttcctggcacagctatcatatcaagacctacagaacaaatagcagtcattgcttcaagcttatctatacttaaagcacctttaataacagcatcaatcatacctgcatcttcagatactggtataaacgctccactaagtcctccaacatgtgaacatgccattactccaccttttttaacagcatcatttaaaagtgctaatgctgctgtagtcccatgagtaccaacaacttcaagacccatttcctctaatatatttgctactgaatcaccaatagcaggtgtaggagctagtgataagtctattatcccaaatggaacatccaatctactagaagcttcctttgccacaagttgtccaactcttgtaattttaaatgcagtctttttaactgtttctgaaacaacatcaaaaggctctccctttactttctctaaagctctcttaacaacaccagggccacttacaccaacatttataattctatcagcctcaccaacaccatggaaagctcctgccataaatggattatcttctactgcattacaaaatactactaattttgcacaaccaaaaccttttgcatcttttgttaattctgcagtttcttttatgatttctcccatttctttcactgcatccatatttataccacatcttgtagaacctacatttactgaagcacatactttattagtacttgctagagcttttggaattgacttaattagtatcttatcaccttttgtatatcccttttgaactaatgctgagaatccaccaataaaatctatacctaaatcctctgcagccttatccaatgtctgtgcaaactttacatagtcattttcatctgttgcacctgcaataatggaaattggagttactgatacccttttatttacaattgggataccaaattcacgctctatatcttttccaaccttcaccaaatctttagcagaactcataatcttattgtatattttttctctagctttatctccatcagggtctatacaatctaataaagaaatccccatagttatagttcttatatccaactgttcttcatctatcatctttattgtttcaagtatatttcctacattcactattatcacctccccttactgtctactacagattatgcattgaattaaatatttcttctcgctgaatttttacatccactgataatttcttacctctttcaaccaagtcctcaaccgttttctcaaaagaatttaatgatttctctaaatcaactatcataatcatagtaaaataatcctgtaatattttttgtgatatatctactatgttgatattttgcttgtataattcatcactaattcctgccactatacctggtttatcctttccaattactgttaaaattgctttcataataatatcctcccttatttttttataaatcttatatttttacaaattgaactatgtattaacatatatttcatttatttgttagtaaaccactttttatgtatatatttaatatattttaatacctatacattcatttgtcaattttttttcaatattccattatttttatactatttagaaaattcatattttatatatgttttctcaacaataaatacagttttcataataatgaaaggtattacttagcaatctcgtgattttctaaataatacctctctaaaaattatttttttaattttatgaatttaattatactttttctagtatcaggatttacaattaatatagaaccaatcataattggtgttagtatacaaaataaaaaaataatatctttttttagattatattctttagattctaatttataattattatttattattccatcataatcacttatatttgacttatttttatttgtatcttgatttttgttagaaatactttccctataaggaaaagaatgttcattggtaccaaatactgattttgagcttaaatcataattatcatcattttctgtaattggatttttattgtaaaatcctttttctttatcagaattattttctttattaccgtctttaggtatatcatgaggatttttattttcattgctatcagtacttgattctacatcatctttaggagtatttggttgtttctcatcagaattattattttcattattattgttttgattgttattactatcattattttcatttccattattcccatcttgattgttatcatcctcatctctatccgggtcgtctctacctcctcctccacggtcaccatcaatatcatcattttcccgttcatcatctggcgtctcttggttgtctccgcctcccattataaatcctggtttaaaaactatatttgaatacccttcttttaatcctcctaccacttttactctaaaacaacgcaacttaaaatcttcaaaaaaaagtatagcttgatctctaatatcctcctgttcttcagatatccaattgattccatcgcttgaatattcaacaaaaaccttacttgcactatacggcatatcataaaataaaacagctacatatccattttttgtattttgaaattccagttccaaattgtctattgtttttttctctataacagatacattcaaaataggaactacatcatcatttattataattttttctttatttaacatttctgttttaaactttcctgttatatcaaaattttctcccttttccaacttttcataataatcagtaaaatcccattctacatctatatcaagttgattaccactagatgtttctaataccatatatttgggaaattttatattttctattttatcatctttacttacttttatttcatcactaaatacaccaattcccctatgacaacatttcacaatattatagccagaatctttagctatagagggtataagctcattataatcatcaattatataaactttcttactttctgatataattgattgtgccaacttattattatctcttagtaacccactttcattgttgctactatatgcttttattgaagtttcttctatctcaacatcacctttagaataaacacctatagcatgttctccattcacttcaatatccttatttagtattctaatatcattttcagtataaattcctattgcatcttttccatttgcctttattttttcaacagattcgtaggatgatttaatatgtaagtctcctccttcttcaacgtataaggctgtcccatcagtagcaattatgttgtttataccaatacttatacttccaccattttctatatgtattactccttcttttcctccttcacctattatattcaattcattatcatcaataataaatctcccatgattttttatcaatattttatatttgttggtatctattgtaaaattactgtcataaggaatataaaatctaaactcttcatctattaccatattacaagaaagagtataaactatttcttctttattatttttattttcttgaacccacctttcaaaatcttcaagacaattttcctcttgtccaaaaactttatgtggaaaacttataaaacacaaaactattatactcataaaaataaatatctcatactttttcatcttacactcctagaaattttttagctttgaaacaatcctgtcgaaacatatacttcacccactataatttttccacaattatcaattattgtcaatttatataagtatctttattaattgttataaataaaaagctacttactaaagtaaacagacgtttcactttaataagtagctatatttttataacaaaatagttataatattagaacttccttcatttacaattttttgtaaagtcttttgcattttaactcttatctcttctggcatagtatataatttactttgtaattgctcttttactaagtcatgtagtgacttaccaaacatatttgattcccataaatctgctggttgctcttcaaatacttccataagatattttatcatctcttcaccttgattttgatttccaactattggagagacctctgtagatatatctgcttttataatatgaagtgatggtgcattggcttttaacttgataccatattgttttccttgtttcattatttctggttcttccagactaagttcttctaaagaaggagctactactccatatccttttatcttggcatctattaaagcactttctattttatcatactcatttttaactttagatagtctagttatcagactaagcagttgataatctccttcaattttaaatccacttttttcttcaaggacattatagaataaatcttgctttgtctgtaaatcaatatttataacaccttctcctagctctacattatcaacacctgtatcttccaaaaactctaactcagaaaatccttgtataataccttctatatctcttattttacctatatctataatactttgttttaatgttgttattatgctactttttatccaatgatttctttcaagaccttcaacccattttggtaagttgattcttatttctgtaagtggaaaatcatataatacagcttccataacctcctctatatcttcttcttccatttcaaccacattcattggaagaactggaacttcatacttttcttccaattcacttctaagcatactcgtttcctcactttttggacttaacgtatttaaaaccactgcaaatggttttttaagatttttcaattcttgtataactctctcttctggttctacatagctttttctgtcaattccagtaactgaaccatctgtcaagacaactatccctattgtagaatggtcttttataacttttttagttcctatctctgctgccttttcaaatgtcatagcttcttgtgaccaaggagtggatactaatctttgttttccaccttcctcatgccctaaagctccttcaactatgtatccaacacaatctaccattcttacttttaaagatactgtgtcttttatttttatttctacaccatctgctggtacaaattttggttctactgtcattatcgttttacctgaaccactttggggtatctcatctcttgttctatcctttttaaattcattgtctatattaggtataaccaacttttccataaattttcttataaaagttgattttcctgttcttacaggtccaactactccaatatatatatccccctgagtccttttggatatatcttcgtatatgttattattcatattattcctcctatacatctaatcttattaaattatatttagagttaagggttaatattcttaaaatagaaaaataaagaccagcaatattaatttaatttacatatagaaatttgtaaatttcaatgtaaattaaattaatattgctggtccaaatagtagtgtattatattaactgactttagtagtattttcatttgacttattattcatctcaataagttctttacgtctttcttttgtcatgttcatccatataaatgtaaacaccaatccaattatggctactatagtaagaactatgaagtagtacctatatccagttacacccggaaatgcatccaatatcttccctgctgctaaaggacaaagtacttctggaagatatcctaatgtagcaactattcctatagcagttcctgatattgataatgaataattaccttcttcaagtaacgaatagtgtaaaccttgaattgcatacatagatacatatattgcaacacatccaatcaatagtatataaatcatagatgattttgttggtgtaaatattacacctaaaagacctgcaatcataagtataaatccataagatataatctttgatgaacctactttatctccaagtaatccagaagcagctgatgctactggtctacaatactgagctaatattgagattgcagatgcaaacaccacagtagctccaaatgcttcagttgaataaggcgtaaaataataaaatgacatattagctgaatatgaacaaaacattattattgttattatccatgtatgaggcatttttattactgcaaaaaaggcttctttatcaaattttgctgatacctctttttcattatcctttaatttgaaaaatactaatactccaactattacatttattgccgagtataatactataatagctgtaagaccagatttatcacttacttttgatgaaatatacccaaatagtatcaatactagagatagatgaattgcattggtaattccacgaccactttccataaatccaaaagcttttccttgttcattttcagatgctaacattctaacagcttttacaagagctggccaaaaagtaagtattgttgttattccccataaggcatggattaaaaacacaacaatatatggaggataaagtgttaatacaagaccagatattcctgtaataattaaagaacctgaaagcaattttctggctgaaatacggtctgctaaaaaaccaccaaaaaggtatgataccattgcaagtagaccataaatgcttcctaagcttcccatttgtgtatttgtaagattaaatgcttgtgcaaaagtatcataataataattctttaaatatggtaaagcatatataaatgctcctgctacaaagagtattatcaagactttgaaatttttccaaatgcttggtttatttacttcaactgacatacttcctccttatgtaaatacctgtaaattttcatgataattaattattgcttattttattgtttattcaatatttcggaatatttattaatatattaggttaatctatcaataatttatggtgagttatgagctaaaagtaaactcttttagctcaccataataattatatttttatttatactaacgtccagagttattagatatctttttttcatagttcttccatagcattaaacctgttattataacaaaaagacctcctcctatcatttcaatctcatagattatattatcttttaaagtctccataactggtgccgttgagaaaagtatgccaactacagttactacaagtaccattctggcaatattgatacaaactgaatcactttttgcaattgaatatggtctttcttcatttggtcttgtctttctaagtctaatataagatgtaaaaagcaagacatatggaaataatgctgttaatgctgtcatagtaacaagaacattgtatatattatctactgatggtaataagtttgttcctacaagaagtagactcactattatagcctgaactattactgcatttgatggtatattgtatttatttgtaacagtcaattgcttaggaaatacaccttctcttacatttccaaaaagcatctttactggacctgctatataaagtattaatgctcctagtactgataaagttattccaaatgctactattcttataaaccaacttcctatacctaaatcttgtgcaactttagctaatgcatctagtatccctgtagacgctgcaattttatctggaggaagtatcattgttattgctactgaacctaagatatagattcctcctattaaaacagccacagttaatatagctttaggaaagtttttcttagcattatccatttcggttatgaaattagcagtcgtttcagctcctgataatgcaaatattatagcagatatagaaactaatgaattggcatctatttttggtattatattttggattgtatatatcgatgctgatggagcttttttgagaataactacagacataaatgccatcactataagtaatatagcaggaattgtagaacctaatgctcctgtattcgtaaaaaattttccaaatgccatcccacgagtacttactaaggacaacagccaaaatattatgagtgaaagtgctaaaataaacatcttattgtttgataaatctggatttccaagcatatatgcaatatttatagctaaaaatgtcaagaaagaagaataccaaaatatctttgatgtccaatttagccatgacaccataaatccccacttctctccataggcttgtttaacccattctccaagtccaccatcttttggatatgttgcagccaactctgcacatataagtgatgcaggaacaaagaatataaaagcaaacaataaccaaactggtatagaaccaagacccaatccaaaactagaggcagtagatttagctatccatctaatcccaaatagtgctgatatattcataaatactaaatcccaaaatccaattttctttttcactgtaattcctccaatttcaaatttattcaaactcatacacaatgtattgatttaaatatcaagtataagttcttcaacacttcttggataattagttataattgtagcaccattcttacctactattgctgtatctgagtgtctaaatcctccaactccaggtatatatatccctggctccatagaaaataccattccttcttctaatattaattcattgtcaaatcttaaatatggctcttcatgttctgataaacctaaaccatgaccaattctatgatttgaatataactctagaccatactttgcaacaacagctcttgctgcttcatccaccattcttgctggtataccagcttttattgtatctaatccagcttgttgagcctctactgcaatcttaaacacttctttttgtctttctgttggtttacctataataaaagttctttcattttctgctctatagttttcataccaaacctgtctactatgtattactatatctcctctttgaagtatcctagtattggaatctaaatgaggttgtgctgttctatcaatccctgaacaagtccagtttgcaaatcctatatatgtatcaggataattttcagaaacatattttagtaaagcattatcccccgcaacgtcaaactccaattcactcatcccaactctaacattttctaaagacccttttattcctatatcagataggtaacctgctatcttcaaaaattctatttcttttgcatcttttacatatctcatttcaaatattttacttccaacatctttgatagcaaatgacttatcagttatatactctgaaaaacttgcagatactatatctttttctattccaacagttgttcctttagggtatttatttaaaattatatctaagtaatgtttatgtgatattccatgttctttcatttctggtatttcataatacacatatacattatcaacttttgcaacttctttagcatgtaattcttctaatccaggtactattaattctattttatcttgagttactactgttacaattggtctagaataagttattgctttaaatccactaatataaaattgattgtctggttcaaatattaaagcaatttcaatgcttttttcattcatgtactttctcaatctttctagtctcatattatttgacataatgcacctctttcttaatattcagataatttattcaatacaacaaggataaatatattattttaaaattcttaatatttttagtacttgtcgtatttgcatgtaaattaattttatttgtgattattttatcataatcatgattattttgtcaatcacgattttatttttaaaatttttttatattctagtgattttaaattatctaaaatataacgagtatacattgtattttggaatattattcttgatttatggtaagtttaatgataaaatcacgattatataaactatattgattatttgtaggtgaataaaatgacaaataaagaattacaaaagaaaaggatattgatgtatttcatagaagctgctcaaaatattatggaaaacgaaggtatagaaaatattacacttcgtaaggttgcagatatggctggatataatagttcaactctatataaatactttaaaaatttagaccatttaatatcatttgcatctataaaatattttaaagattataacttgaatatttcaagatgtatagaaaatgtcaatgatgaatataagaaatatataattatgtggaaattattttgtaagcattcttttgacaatgctcaagctttttatcaggtattttttaacttgtctagtgatgaacttagctatataacaaaacaatattatgatatgtttccagaagatttaggtattcatgatagtgacatatctttaatgattacaggagaaagtataaaggaaagaaataagatactattaaacaatcttgtagatactggatatataccagctaaagatttagacataatcaatgatataattatttctttttatcaaaatctattattcttaaaaaagaacacaggaaaaaattctggtgatgatgaattaactatgaaaatgatttcttctattgaatacataataaaacatgctaaataaaattaaaatatggctgtctcaaaatagagataagccttttttattgttgaaataataaaaatatatttaatttcatataaaaaaaagtgcctcgtaaactaaaaagttcattttgagacacccctaaaacaaatttattatttattatacaatagtttatatatcatcacctaaaactacttcttccatttcatgctttttacttctcatcattagttctattccaacttctttaggatttgaacctttatttattacagaatatatagcattagttataggcatatctatatctaatttttcagcaacatcatgtgctacttcagtagcagttatgccttctacaaccatctttacttcttttaaagtatcttctaaactcatacctttacctatgagtataccagctcttctatttctactatgcatacttgtacaagtaactattaaatctccaatacctgaaagacctgcaaaggtagacatattagctcccatagcaattccaagtctgctcatttcactaatacctcttgtcataagggcagcttttgcattatcaccataccctaatccgtcacatatcccagctccaaatgctataatattttttaatgctcctccaagttctactccaactatgtctggattcgtataaactctaagtttagggctcataaataaatcttgtatcatctgtgctatttttaaatctttagaagcaactactacggtagtaggaatatcccttgctacttcttcagcatgagatggcccagatagtattacatatggattttgtggtaattcttcttcacagacttgagataatctaagcccagtccctttttcaagacctttagctacattaacaataacttgtccttcttttataaatggttttattttttggcaagtacttcttacagcctgtgatggaactgctaaaactattaccttacaatcttttatagttttttctatatcagtacttatagttatattgtttggaaataatactcctggtaaatagtctgtattttctttagttctgtttatttttttagcttgttcctcttttcgagtccacatgctcacatcattacctttttttgcaagccctaaagctaatgcacttccccagcttccagtacctaatacacatactttctccatgtttaacaccacctgagtataatatatttactattctttcttttgaccaatttttctctctgtcccatttaataatcgctttatatttgctctgtgattatatattactgatgcagttaagaacagagctactattaaaccagctttattttttaccataatcataaatattggtgaacatcctattcctacaacagaacccaatgaaacatactttgttatagctaccaccaatataaatactgctagacacattagtgttattactggatttacagctagcattgcacctagtgaagttgcaacacctttacctcctctaaatcctaaaactgctggccaattatgacctgctacaacacatataactgccagatatccagctaaaagagtatctattccaaccaatcttgctgcaaattctgatattaaaacagccattacacctttaagaacatcacctaaaaatgtcattgctcctgctctttttccaagtgtcctaagtacatttgtcgaacctgcattaccagaaccttgagtccttatatcaaccccagcaattcgctttgcaactatgtatgaggtagatatatttcctaaaagatatgcaactacagcaataattatataactaaatatctccactgaatttcccccctttagttatattttaagatatttattttttatttttttgtctatactcaaactttatggaagttccttcaaatccaaaattttctcttatcttattctcaaggtatctttgatatgagaagtgagttaaatccttatcatttataaacaatgtaattttaggaggtctaatgtcagtttgagtcccatagtaaatttttagtcttctacctttgtcagatggtggttgatttaacattacagcttctccaattacttcattcagtgctgaagttgatattctcttagaatgttcatttgacacatattcaactgtatctagtatcttgttcattctttgattagtttttgcagaaacaaatacgattggagcatacatcataaatggaaatttttcttttatatcttttgtgtaattactcatagtcttattatctttctctattaaatcccatttattgattacaaatatgcatccttttccttcatcatgtgctatacctgcaacctttgtatcttgttctgttacaccttctaaggcatctattactatcaatactacatctgctctatctacagcactcatagctcttattacactgtatttttctattgtctcatatattttactttttcttctaagccctgctgtatctattagaagaaatttctgtccatttttttcaaaataagtatcaattgcgtctctagtagttcctgcaattggacttacaattactctttcttctccaagtatcttattgagtatagaactttttcctgcatttggtttacctgttatagctactcttattatatcttcttcatactctgtatctaatcctgctggaaaattttcaactatctcatctaataaatctccaaatcccatactattggctcctgaaactgcaaaaggcgttccaaatcccaactcataaaaatcatatatattatcaaattgactttgactatcaatcttattaaccactaagattactggtttttttgtctttctaagcaattgtgcaatttctttatcagcagctgttattccagctttaccatcaactataaaaagtattacatgtgacatgtccattgcaagcatggcttgatttctcatttgagataatattatatcttcgctatcaggttcaattcctcctgtatccactaatgtaaaatatttatctaaccactctacttcagcaaatattctatctcttgtaactccaggtgtattttcaactattgatatcctttttcctgcaaatttattaaatattgtagacttaccaacgtttggtctcccaactacagctacaactggcctacttatactcattttatttctccttccatcttttgttttctattttaaaattttatccacaaagtcttttccttcattcaaacaagggataatttttattctcataagttcttctaattgatttaattcaatattatctaagaaaatttcttcatctgcttttagcatacttcttgttatataaagagcttctcctaattctttatcttcaagttgttcttttaaatccttagctgttaaaagacctgatacagttattgtctctccaaaaaacttgtttttgatttcatatacatttacttgaagatttttaaacttgtccatcatagcatctgccatactctgtataaattcatatgcagaatgaccagtagctattgatactttcttctctctttttagaatattctcaggcaatatatttagatactcttcaatctctgtttttaacttacgtatcatacctacaccatcttcaaactgtaaaaaaccttcatattcttcatatccaggcaattcactattagatagtatataaaattcatctgataaaaatgcaaatcgagtacctaatttttcaagatatttctgttgtatttgatgtatttgctctatagttttacttgcgctcttatcattaaatatatttaattctactagattttctctatgctttgtaatcccaactggaactatcgcaacactgtttacatatggataaagttgagctagttcttttattgttctatccaattcctttccatcatttatacctggacataaaacaatttgacagttcatttctatatgagcatctgccaatctcttcattataccatataattttcctgcaaatttattgcttatcattttttgtcttaactctggattagttgtatgcacagatatatttataggacttattctatattttataatattatttatatcttcttcactcatatttgtaagtgtgacaaaatttccttgtaaaaaagataatctcgaatcatcatctttaaaataaagagtttctctcataccttctggcaattggtctataaaacaaaacatacacttatttctacagcttttagcttggtcaattatcggatttgtaaattcaacacccaaatcttcatcatagtctttttctatctcgtatatgtagacttcgccatcttttttttgtatttctacatctaaatattcatcacttagtaagaatctatactctattatatcatgtattggctgttcattcacagatataagtaaatctcctacctctatacctatttcttctgcaatactatctttataaaccttacttataatattatttactttttttacatttacttccaatattttcaccactcttttgtattcatcaatgcttattataatatattttaatatgcaatttatttatttattatattttatgatagcatttttaagcatttcatgtcataataacacattttaattctaatagtcaatataagtaaatagctataaaatagattagaacaaataatattcaaatttaagtttcttaaaaatttgaatattatttgttcttaaaaaaattttataaatttaatgttttactatgattaacgtcccatttgtcatatcatgaaccattccacctacacactttgacatcaacaatgccttattttgtaagtctttctcatcatttgcataaaatattggacaacctccaccatttttcatattcttatcaagtgtaactatagctagggtatattcatttaaacctatatccattcccatcttatgcacttcctttctttcctattttataattttttagtgataagttttttcctttagagcttgaaagtattgggcatgactttacagcttccattactttttccatattcttatctactggtaaataagcaatcattatactttcatcctctttatttcttctaggtaatggtacgaatgaaggttctccataatctccatataaacctaaccttgaatatatattgtatactattgcttgtctttgaccggagtcaaataatattcctgcattagcataatccttatttttaggaattatttgtattcctacacctctattaatatatacttctctatcactttttagacctatatttgttataccttttaaatctcccacctttagtatagattcgtccacaaaactaatttcagcaggcattacatcagctatgtctccaatactttttctagtaagaagtttttttaatataaaggctaacactaatccacaaattgaacttattaccaaactcatcccttcacttattttcgtttctgcaagtattacataatacaatcctattgttaaaaaagatgtaactatacacatataatttcttacttcataggttctagctatctcttctatgaatgcagcacctctctttacaagttgaacttcctctaaattttgcaatgtatttcttctatttgctctcacttgtctaaattgttctgctgctagagataaaaatgttatggatgtataagaacgatttataagagctggaaccaataatgctcctaatgaagaagcgacgaatgctaatataagttgagatagtaaaacatttggttgcgttggatactgtttttggtctaaattcaacattataattctagatgttataccaataataacagcaacaaaaaatactctatccattaaatcactcctaaaatatttaatttgaaattttacatgtaaatctacaaagtctttctagaaaaatcactctgctttccttttgatgtttctatgataggtgtacttttcactacatctatcatgacatctatatctttgagtattggcatatatggtataaccacagtacttttttctaaattggtcttagatatagcaacaatatcaacctcatctacatctctatctatccccatatgaataaatagattatgtattatagcttgtctttgccctatatcatttactattccaaatgcacctaaatctcttggtataacttctatggccagacattcatttctatacttttctcttgtactttctagacctatattagttattattacatcatttaccattaaaataggtccttcaaaacttatttttgcaggaactatatctgctatatctgctatactgtttcttcttaaaaatcttctaaaaatcaagccaacaatagctcctgacacaatagctaaaattgtgcaatgaaaaaagctaaggtcatactttcttgcaaaaacgatataaactatcgaagatactagtgcagaaaaaagacttatataacttctagattcatacgtagatgctatttcttcaacataagcatctccttttggtactaattcttcattatcaatattctttagtgttattctttcttgttccgcaagaccttgaaactgttgtattgctactgcaaaaaatgtcaaggctgcaaactccttatctataagtgcaggtaatgctatagcacctaacgaagctgaaagcccagatataattatctgttctaaataatcttgtggtcttgatgggtattgtttgtctgtaactcttaaaactaatcctctacataatattcctacaactaatgcaactataaaagagtgtctaaataaatttgcattcaataaactttcttccattttctcagctccttctcttatatagtttgtgcaaaaaacaaaaaaaattcccttctatttaaggaaatttttttgtaatattgtaactataaattcgctaccaatgccaagttcactttttacttttatacatccatttagtgatttgactatatgctttgttatagccaatcctaaacccgttcctcctacatccctacttcttgctttatctaccctataaaatcgttcaaatattcgttctacatcttcttttggtatccctacaccattgtctataactttaattacgattttttcttcatcttttaacactacaacttgtacaatcccattatcttgggtatactttatagcattatcaactaggtttaagaacacttgctttatatagtctttattggatagtatacttattgatttatcatcacatttatataaaacttctatatttttttcactagctgaatgttgagttatttcatatacctctttaaatacatcatatactacaacattttccataagaagagtatctttattttctacaaatgataacagcaatatatcatcaatcaacctttttaatctatctgattcgctttctattatttctaagaatctatttctagtattcacatctatattttcatttgactttagtgtttcaacaaacccacttatagatgtaagtggtgttttaagttcatgacttacatttgcaacaaaatcacttctcatattttcaagtttaacttttttagtaatatcttctatatttactatcgaacctattattacgttgttagtattctgaagataaactgggtctacctttatcttatatacgatatcatctttagtagtaatattagcagtttcattatctttagaaccaataaattgaagtatttgttttaatatttcttcttcttttattacaacattaatattatgaccttcaactaattgatttggttcactctttatcatttcttttgcttcatcatttatcagaagtatatttccatttacatctatagccaaaattccatgagatatactctttaatatagatcttaactgtaaatgtttatactgtacttcttctaaggttttatccatattctttatcatatgattaaaatttctagctaattcaccaagttctcctttggctgatatgttaagcctagcatgatattcattattacttactttttttgagacgtatataaactcttttaaatatttccttaatgttattgtatatcttacagctaatataacaatggctatggacaacataacaataaaaaaatatatactatttaaatcttccacaagataacactcctaaaatataacctttttaatctattttataccctacacctcttatagtctctatatatttttccgatttatcttcatcttctattttttttcttaaatatcttatatgaacatctactgttctagtttctccatagtattcatacccccatattttatccaaaagataatttcttgaaagtacttttcctttattttgaattaataattttaacaattcaaattccttaagagttaactctatcttttcagagcctttggtaacttcatgttttgataaatctagttttaaattgcctgtagtaagtatattgttttcttcacctaagctagtcaaattatatctccttaaaacagaactaatcctagctaacaactcttttatactaaatggcttagttatatagtcatcagcacctatttcaagcccttcaaccttgtcattttccatatttttagcagtaagcattataacaggaatattttttaagtccttatcacttcttatttttctcaaaacttctattccacttatatttggtaacatccaatctaaaagtattaaatctggtttaatttccttagcctttataaatccgtcaaatccatcatatgaataactaacttcgtaatttgacacctccaaattgaattttaatagctcaactatatgcatttcatcgtctataacaagcactttagtattcattaaaaagctcctctctattttatctgtagtaccgttcctattcgttctgatgccttattatgttttctataagagtggaatttatctgctctacaactagtgcataaatttaaatttattatattttcttttttaactccactacatctaagcatatactcattaattttccataaatctaaatagtaacttccctcttttattatatagaacttttcatcattatttgtaagaattgtgttaaatttttctactaaatcttcagacacttcatagcaacatggtccaattgatggcccaattatacatactaaatcttcaggaactgttttatagcattcagacattaattttattgttttatgacctatattactaaaagtccctctccaacctgcatgagccagtcctatggctttatttttagcatctataattgatataggtacacagtctgctgtaaacagtaaaagtggtactttttccaagtttgttataagtgcatctccatctcttcttttccctatagtatctttattgactatattaactatatctgaatgtatttgagaattactagttatattttcaaatgtcaaatcacattctttacatacttttaacatatcttctctattttttgcatctatattcttacatgttataactagatttacagaatttaatttttcatcaagttcttcacaattaccacttaaattaacatactctttaatatcttgtacattttttatatttatataatctttcatcatttgtctcctttttctatcagtatacttttaagttcatttacaaaagtatttatatctttaaattgtctatacacagaagcaaatcttacataggcaacctcatctaactctttcaatttatccattaccatctcaccgatttttttggtttcaatttcttctataaaacatttatttatttcattttcaatatgtacaacaatactttcaatctcttcaatagaaacaggtcttttttcacatgcttttagcaatccatattttatcttttctctatcaaaatattctctactattatcctttttaatgaccattaaaggagttgtttctattttctcatacgtagtaaacctctttttacatgattcacactcacgtcttcttctgatagattttaaatctgtatgtctagaatctattacctttgattctttataattacaataaggacattgcatctatattcctcctttgtttaactatatctcaaactcatctaagcttaattctgaacctatatttactattattgtatcacaacctattttaagtatatcattccaaaatataacttcttcatcccctcctcttgaaaaaaaacttctacttccatctccaaaaatggtaaatgagactaccttaccttcgtgaatatccatgtctatgtctattataaaccccatcctttttccattttttacatttataatttctttttccattatatcagaaactctaatcatattgtactcaccctttctttaaaaataaatatgtatcgaagtaaaaaaaaatgacctatataggtcatttaaattaaaataatgtttacagtccatggattacttatacatattttctcatattttttaaagcatttttttcaattcttgatacttgtgcttgagatataccgatttcatcagcaacttctatctgagttcttcctttgtaaaaccttaaatctaataccaacttttctctactatttaatttcttaatagcttctttaagtgatatttcttgcaaccaattttcatcagtatcttttttatcttgaacctgatccataacaaatattgcatctccattgtcttgatatactgggtcaaacagagatattgggtcttgtatggcatcaagtgccattacaactgattctacttctaattctaattcctttgctatttctgatactgtaggttctttagaatttgttctaattaatctttctctaacttgtagtgccttatatgctatatcttttaatgacctacttactctaattgggttattgtctcttagatatcttctaatttctcctataatcataggaacagcataagttgaaaaccttacattttggcttaaatcaaagttatctatagcttttataagaccaatacaacctatttgaaataaatcgtctatattttctcctctgttgttaaacttttttattacactcaagactaatcttaaatttcctcttacaaactgttgtctggcttcttcatcaccattttttatttgtaataaaagttccttcatttgcttatttttaagaactggaagttctgatgtattaacaccacatatttcaaccttattaacttgcatatattttcagtcctctctcaaaagtattcatctattgaaattatttacatttccaatttttttatactttttaagaagaattaatttaacattatacaaattttttcatttctttttgcaaccttgagattattttcttttcaagtctagatatgtaggactgtgatattccaagcattccagcaacttctttttgtgttttttcaatacctttatcaataagaccaaatcttaattccataatttgcttttctctgtcacttaatctgtcaagtgccataaccaacaaatctctatctatttcttcttcaattattttgtatatttcatcattttctgtacccaatacatcagataataaaagttcatttccatctaaatctatatttaaaggttcatcaaatgatacttctgttttctttttattattttttcttaagtacattaatatttcattttctatacatctcgaagcataagttgccaattttatatttttattcagtttaaaagtattaactgcttttatcaaacctatagttcctattgaaatcaaatcttctacatctatacctgtattttcaaattttctcgatatgtagactactaatctaagatttctttctattaaaattgactttacactttcatctgtttctagcttttgtaaaagctccatttcttcttctggtttcaatggaggaggaagtatatttgcccctcccatatagtatattccctttggctttattatttttaatttaatacctaacatagtaataaagcttattattctttctttcaatcgtaacattccttgtcccccttaaattttcacctaaaatccaggcaatatatttggattcattattgctccatattctctatcattaaaatttgaaataccaagtattatatttcctatcttttgctcatctacttctatatagtcagcttttaagcctattattatgcttgtcttattacttccagcatgtttataaggtattattctaactctacctgaagttttatcatctaaacttcctataatttcttgtgctttcttcatatctatatcttcataattaatatttaatagtttttctggaataaatccttctaacacactagacttaactattattacatcactttgacttattgggtcttttaacaaattaccactatctactaaagctttacagcaaaaacttttttctagtaagtttatatttatagtctttgtaagctccttaatgtacttaagcattttcaaatctttataaatgtattttaataattcacaactcacataagtacatgcaattaagaaagatatttttaagtgacttattcctgtaaaataaattataaaataagtgcttccagaaataaaaatgtttactagataaaaaactaacgctacatgaacataatcttttttgctcttgcttctaaatgaaattaaagttattatgctcatgattattattttaaatggtacagtaaatagtatattcattgatggatacaaataagcaacagaataggcacttcctaaactagcccccaataacttattttttttaggattatatcttttagtaagaatagaagtacaacttataataatataatttattactaggttttctataacatagtactcaatatacaccatgtatccccccttaaaacctttaaacatattataagatagtatgtacaaaattttatgtcacttttgatggtcgaatccaaaacaaattctatttaaaaagaacaatgatatatgtcttatactttatgtcgtcaaaagatatttttttaatgccaaacagatagacttttttgtagaatccaatatatctaggtagaagttattcgctttacttttggtatatttataaaaaaaagactacataatttaataatatatcaagtaaatcttttacttatataaaatcaaattatatagtctgtaaattcaaatataaattattgtgctagtaatccatttgcatattttgcagattcatttagtgcttgttctggagttatgtctccagctatcatcatttgaagttgtttccataaatattcatatatctctactccatgaggtccaactgtcaatggtctatacatatgtttatctcttgtcaccatttcttcaaatcttgggtctccttggtatttttcacctttagcaactggagctctaggtatttctttgtggaaagcttccattgattctttgcttaacatatactcaagaagtttaaatccaagttctttatttttacatgctgacattaatgttaaatcatctactgaagcaaaacttccaactgtcttatcttctaatgatgttacatatccccagtttaaatccgggaatgatttatcaaatgtacttgtagcagcagaggatagcattatagtaaatgcagcttttcctggtccaaatacactttcaatcatttcattactatcttttgataaagcatcttctggaatatactttttcatatcatttataaagtttgcagctttcaagccttctgcattattaaatttaactgattttaaatcatcattatatatatctccaccagcttgccataaatacggataccagttccagtttaagcttccaaatactttagaaccccaaccttgtgcaagaccccactggtcgatttttccatctccatcagtatcttttgttgctttttcacagattcttttaaaatcatcccatgtttttggaggtttttctcctaatttttctagtatatctttattgtagtacaatacgcctggattagcagcttctataggtaaaccataaataccacccatcatttttgcatcatctaagtatagataattatctgaagttcctgatttttctaaataaggtgttaaatcttctactgcacccatttctataaattgagggaacatctctgcatacatgtatcctatatctggaccttcacctgcacttattgctgttgcatatttttctgcgtagttatcccatggtactatctgaaattcaatttcacagttattttctttttcaaatttttcaaatatcggcttccatgcatctgcatcatggtctgttaatggtgcagaccatacaactaatttttctttaccctctttgcctttagaatcttctttttttgaacatcctgcaagaattgatactgatagaatccctaccataactaaagaaagaaccttttttagtttaatcatgcttaatcccctttcagactttaatttgtctttttcctcaaatgtttacatttaattcagatttaatattaacaaataagactactcttgtctaatcataaaaaactatactaactcctataactatattttttttctatacctattagatttaattcatactaaaaacttactttttaaattttatcaatatttaaaaatatttttaagtctagccacaaactaactatctaaattgaacaaaataaaaagaagtctattgacttctttataagcttacatattatcttcttcttcttaggaatgtaggtatctccatgctctcatcatcatcttcttcaattatacttgcctttttaggaggctctattttttcctcagcaattacttcttcttcaatttcttttacagcttgttttactgttgtatttaatgaagaacgtatgcttgatttaggtttagtatctaaatctaaggcaccattttgtaatccttcaaatcctgttgcgattactgtaatcattatttcatcacctaaatcttcttttatagaagctccaaatataacatttgcttctgggtcacaggattccataactaaagttgatgcctcattaacttcaaataatcctaagttaggaccacctgtaacattaagaagtactcctttagctccttgtattgatgtttctagaagtggagattgaatagcttgtcttgcagcatcaattgctctagtttcaccactagcactacctatacccatatgagcaagtcccttgtctttcattatagtagtaacatctgcaaagtccaagtttattaacccttcaactgctataaggtctgaaattgattgtataccttgttttaatacatcatctgcaactgcaaaagcatctaacattgatgtatttttttgtactatctgtaaaagtctatcatttggtatcgttataagagtatctacttttgatttaagttctgctattccaccttcagcgttcttcattcttatcttaccttcaaatgcaaaaggtttggtaactacacctactgtaagtatccccatttcttttgccaagcctgcaaccactggagcagctcctgtaccagtaccaccgcccattccggctgttacaaagaccatatcagctccttgaagtaactttactatttcatctttactctcctcagcagctcttttccctacttctggatttgctcctgctccaagtcctctagttaatttttctcctatttgaactttatattcagcttttgatgtatataaagcttgtttatctgtatttactgatataaattcaacgccttttagttgagcttctaccattctattgacagcattgtttccaccgccacctacacctattactttaatttgtgcacattcttctaattctacgtcaaagtttagcatcataaacccccttctctcatgattcaaagttatcgtatgtattaattatatcattttcttcttttattttgttaacctttaagtaacatattccacaaaaacgtaaattttcctttttaaatttcttacttatattgtcaaatattactctttaagtataaaataatttacgtatatattaaatgctctttaatttttacgttttttgttcataatattactaataatatatcgtctaattatagataagttattaaacaatctcataccaaaaactagtacagcaacatagtaaagagaaactcctaacttttctcctatataagtcaataatatagccaatatagcattacctatgaaaccagtaataaaaattacattatcatagttatcttcaaaattggattttatcgctccaaaaatagaatccattattgcaagaatagctactgacatatatatggaataatccatagaatatgtaaatggaatatagtaacctactactacaccaaatgctaatcctcctaaaacccacaacataaatcttcacctctttattttactttgaaacacaactacattacaatcctttttattaattttttttactttttctttatttttttgtatttttcgttttattttgcaaataaattcactttattcccattattttcctgaacttttatattaattccatatatatccttaagagatttagcatatgattctggagagtttatagctgcactcaataaatctatatctcctatagcttttattataaatggttgtccatatgtagtatcatttactgtaatagtagctcctgaacattttatcttacttgttgctagtactctttccccatttatagaaattgctcttgctccagccttttttaaatcatttaaaactctcaaaatatctatatcatgtataatcaaatcatttggattctgtccgtcttttaactctctctcactatccctcatagtaatagttatgcctggccctgtaacagttgaataaccacttaattctttaacttcttcaagctctttttgcataagtgtttggatagattcatttccattcttttttgcttctttatattcattcaaagtttttttgttgtttttaagagtttcttttaaattttttatttctttttttgtattttctacctcactttcaatactttcagtttgacctaatgttatgtatactctatttgggtctagtgattttatataagttgatatgaaaatgcctaatatgaatgctcctaatataactattttctttttcatactattatttcccctctgctttgtttatatcactatgaccatttatttctatattgtcttctttggtcacttttactttggcattataatatgtttctatttcccagacaataccatactttatattaagtgccgaagccaatgtatcagaatcaccaattgcttttattataattggttcttttatgacagtgtcattcatacaaagcttgtcttcttttaaatacatatatgtattaaaaactattctctggtcgtttatagatatggcacttgcttgtgctgaatttaatttatttatcattgacaataataaatcataattatatagtatactatcatttttatcagagtttcctaagtcttttgtagaatttatctcaatttttatgcctgttccttcaacatctgtatatccagctaatgtttcatatttttctatttctgacttaagtatgtcttgttctcctttattgtttttgcctctataagtctctatatctttcttcacactattaacttctgattgtagattctctttttctgtttttaaagatttaagttcttctgtaagttgctctcctcttttaaaagttgtcatccctctattttctatattaataattttaagttgtaaactaacaagaacacccaatacaacacttcctatgattatacttttatttataaatctttttttcaatatatcacttccttacaattgtctatccttctggactatacactgccaactttccatagttaagatttatagtccctccattagtatttttattttgcaggtcaatcagaattttacttaccctagatatattataatctaagttatcatcattagaaagtaagatttttatattacttcttgtaagcatttctatattgctttctttttttaagtttacataatttatttttctataaattccttcttcttttaaataatttaaagttttaaatacattctccttagttttataatttttaaattttatagatttattatcatcaacgctataatctacatctactatcaagtcttttttactttcattagaacctcttagttcttccaataaatttccttttttatctatataacaataattatcttcatcttttaatactgcaaatatttctttttcttttaaacttataattatcttattgggaagttttctttttatttccacattttctatatatggattttttataagtttatttttcatatctttaaaattgtatgcaaaaatattttcatttagatttatatttagttctttcattatatttgatttggtcaccctcttatttccaattacatctattttctttacatcaaataaatcactttttacaattatacatatacaaaaagataacataagtataaaaactaaaactatcatgacattattcgtatttaactttcttctttttttcaaatataatcaacccctttggttaataaatacacctttagagcttgtttttcctacaaaaaaattataatatttaaagtcaaatttttgcattttattacataacatccaaataaggtattaaattttataaataaatcaatatttcatcaaaataaacatagtatactacatactatttatatatttaaatctgtatacatacaaataaacccctaatttataataatttagaaaatctaatatattataaattaggggtaaatatttacttatcttttctttattcctattaccttagcttgaccttctatacttggagtcgtttctttttttatttcttttacttccttaataactttttccttttttgtttttttagaagttgacttttgtgttgaattgtatactttcattatctcatcatatataaggtctatggcttcaggcttacctatagttttacttgcatttgccatatcaactaaaagttctctatctcctaaaagtttaaatactgctgtatttaggctctctggagttagatttttttctaaaatagcaattcctgccccttgtttttctatactcttggcattatactcttgatgattttcagcagtataagctttaggtattattatagatggctttccaagagccgttatctcagctaatgaaattgctcctgcgctacctataaccaaatcacttgctgcaagtgcatttgccatatcttctaagtaaggcacaactttttggtatggtttaagatttatatcgctaatacttcccataaattcatcataatagcttttgcctgtagcaaatataaaagctatatcttcatttaccatattctttattacaagtctcattgcatcatttatttttcttgaacctccactaccaccatagcaaagtaccattcttttttcgtcacttattgatagattctttcttgcaatattttttcttgataataaaatttcttttctaactggatttcctgtaaaaactaatttatcttctgctgcctctggaaatcttttatgcgaatcttcaaaacttgtaagtacctttgtaactgttttagataaaatcttattagttacaccaggaaaagaattttgctcatgtattatggctggtattttccccatagatgcattaaataaaacaggtccactaacatatccaccagttcctataactatatctggtttaaatttcttaacaatctttcttgattgctccaaacctttaaaaagcttaaaaactctttttacattatcgaaatctatttttcgcttaaaaccttgaactgttacagtctttaattcaaatccatacttaggaactatttctgactctattcccttttccgtcccaacaaaaattatctcagcgtctggatgctcatctcttattttgtttgcaatagctatagctggatacacgtgccctccagttccaccgcctgataataaaactttcatcaaatcatcatctcctgttaattaattttgacatgctttgagatgtttaacactattcctacagctcccataaagatggtgagtgaagttcctccataacttataaatggtagtgctacacctgtagctggcattgatgatgtcgcaactgctatatttaaagctgcttgtattccaatttgtgcacctatacctataacaaccatacaagcaaatacattagaagtcttcaaagctattcttacacatctgtagactaaaactacaaatagcataataactattatacaaccaatcaatcctaactcttctcctattatagcaaatataaagtcattttgtggctctggtatataaaaatacttttgtttactctttcctaagcctagaccaaacaatccacctgaacctagtgcatatagaccttgtattacctgataccccttaccaagagggtcttgaaaaggatctaaaaatgatgtaacacgactaagtctatagggttcagcaattactaatgcagcaaataaagcagccccactccctatcatagcaaatacaattttcatatccattccagcaacaaatatcattacaaaagtaactagaattacagtacctgctgttgacaaatttggctgaagtattatcaacgcaaaaaatatccctggaactacgagaagtggtacaacaccttttgtcaaagattttattttatcataatttttttcaattaattttgcagttaatattattgtagcaaactttgcgatttctgcaggttgaaatgttaaagctcctattcccaaccatctttttgctccgtttgcttctatccctaaaggggtcaaaactaacaataataatactactgctatagctccaattgctgtagcatttttcttccaaaaactataatctattcttgatgtaataatcataactataaatccaagtacagcatatattacattcttttttagaaaatagtacgcatcattgtgtttaaatgaagattgtataaaacttgcactaaacaccataactattcctacaaatactaaaagcatagtagtgtaaaacactactccatcaaattcagtcttcatccttatgtcaatttgttttttcaaattttctttaggcatccaactaatctacctccattcttccatttaagtaagtttagaggtaagagattattttaaattgtttacattatctttgaagtcttttcctcttacttcaaaactttcatacatatcccaacttgcacaagctggtgaaagaagcactatatctccactttttgaaatttcataagaagtcttaactgcttcttccatatcttttactatatgtatgtcattaaatcctttatttttagcacaattttctatatttgatgcagtttctcctaataagaccaatgatttaacatatgactttgcagtttcaagaagttcatcaaaattacttcccttatccatcccccctgctataagtattataggtctatcataagactgtatagcttttatagtggaatctggattagttccctttgaatcatttacatatattacattgtctaaatttcttacaaactcttgtctgtgttccactcctttaaatgtcataagtacatcctttgtaacttctaaatcaattttgcagacatatgctattgctatagctgccatacaattttctaagttatgacctccaggtaaacttacatcatctttatttagaaatttgattttatcatctatatctattattatgtcattattttctaaatatactcctccatttacttttttagttcttgaaaagtaaattactttggcattgcatttatcagctaaagattttactacctcatcatcatagtttaacacacagaaatcctcaacagtttggttcataaatatatttgcctttgcttctatgtatttttccatagtatggtgtctatttaagtggtcctctgtaatatttaatattgcgcttactttaggtctaaattcatctatactctcaagctgaaaactgcttagttcagttactaacacagactcttcacttgaagtttctatagtatctattacaggatttcctatattaccaactacatatgtatctcgttttgctcttgaaaaaatttctcctaccaaactagttgtagttgtctttccatttgtacctgtaatccctataaaaattggattattcgatagtttaaaagctaattctacctcaccaattatatacttgcctgaattttttaatttcaatatgaatggtaggtctagtggtacacctggagacactacaaccatatctatatcatctacatcttctgggtgatgtcctaatatgtattttatgtcatttatagatttcaattcatcaagtatatttctcaatttattttcatcttttatatcatttacgattatacttgcacccaatttatctaaatgtttaattgtagatataccagtttttgcaagtcctactaataaaactttttttccttttaagtccatttttcattccccctagccctaaaatactgctattatacttatccaagctaaaacaactgttataatccaaaaaataaatacaactcttgtttctggccaaccacactgttcaaagtggtggtgtattggagccatcttaaagaatctctttcttgttgccttaaaatatccaacttgaatcaaaactgatagagcctccgcaaaataaattcctccaattataggtattataagcactgagttagttagaactgaaaatgctacaactgcacctcctaatgccattgaacctgtgtcgcccataaacactctagccggatatgaattaaatcctaagaaacctaaacatgctccaacagttgctgctgctaaaactgcgacttctgtatttccagcaatagaacttgcaaatagcataaagaatacagaaactattaatgttactcctgatgctaatccatctaatccatcagtcaagtttacagcatttactattgctacgattataaacatcattattggtatatataatattccaacatttatcacaaaatctgtaaatggtatcataagttgtgaagcacttgatgatgatgtatactgataaaaagcaacataaaaagataatgcaacttgaaggattattttttgatatgcttttagtccaagtgatctttttagctttatttttataaaatcatctaaaaagccaataaaaccaaaacctgcaatacatataagacctactgccatatcatgactaacttttactcttgtaagtccagttattagaattgcaacaatcattataattccacccatagtaggtgttccgtttttagctagatgtgtttggggtccatcatctctaactgtctgaccaaatttaaattttctaagcattggtataaatattggtcctattataattactattaaaaacgcaatcaatgcggtgtacgtaagctctgttattcctaacatcataaaactcctctcccttgtcaattaactcattagtttaagcttatttatttagatattcgactattttttctaatctcatgcctcttgagccttttactaaaatagtgtctcctgtttttactaattcatttaacttgttaaacacatcttctctattctcaaagtgatatatattggctgaattgaatcctaattgttttgcttcttctccaataaacactgaattttcacctatagttattataatatcagtattattcatagatgattttccaactaatctatgaccatactctgaaatttcacccatttctagtatatctccaagtatcgctacccttctacctttatatcttccaagtatctttaaagcagcatccatagaatctggactagcattatatgaatcattaattattgttaatttttcattttttattatgtctagtctcatttttgtccctttaaaattttttaaacctttttttatataatctaaagaaatatttagacacaaaccaactaatatagcagacattgcattatatatattatgttctcctattgttggtataaatatttcctcttttttcccatttattacacatataaatgttaaactatcctcttccatagtataactttcacaataaatatcattgtttttattaaagccaaatgtttttaacttatatacatgttctttttcttttaatgtagataaaaacttatcatctccatttacaattaaagtatttgtttcatcaaagtttgaagtaatctccatctttgctttcaaaataccctcttgtgaacccagtttttctacatgtgataatcctatattcgatatgactgcaattttaggatttactatatccactaaatattttatttcattgaatccagacatacccatctctattacagcacactcatgttctttatttagattaaataaagtcaatggaactccaaaatgattatttaagtttttttcattttttagtatatttaactttgcagatatggcagagtaaatcatatctctagtagtagtttttcccacactacctgtaacacctataaatggaatatcaaatttttctttatagtattttgaaatatctcctagagccaaagatgtatcttttacctctattaaatttatatccgaactttctaattttattccattactttcattttttataaaagttttacatccactatcatatgcaggcttcataaatgtatgcccatctaaattttctccaactatggctacaaatgcattttgggcacttgcctccctgctatctataactatatcacttacacagtcattataatctccatatattaacttcccattagttgcaagtactaactcttttattgttaagcactccattattaaactcctcctttaaaaccttagctatattctcttagcaacaaaaggcaatgtataccgttatatatacattgcctacgataactcttaactttataattatatactatatttctgtttttttgaagatgtttatgggtatatgttaattatctgttactttttagttttcaaaatatagggttatacttgagtcttcattaacttttactccaggttttgggaatatatcctttacctttgtatcttctggaagttctatatctgcatctaagtctggttttaacttcgcatcctccaatgcctttacagcatctcctatttttagatttcttacatctggcactttaacttgcttcttttcatactcagctttttcttcttctttatatactggtttaactcccaaatattttaaagagtcattcattatttctttcactattggtcctgctgtagtactaccaaatgcacttactcctgttggttcgtcaacaatagcaagaactactatttgcgggtcatcacaaggtgctattccaacaaatgaacatatatactttcctggagcatacttaccatctataactttttgagctgtacctgttttaccaccaagtctataccctggtatatatgctatctttcctccaccttcagttacaactgattctgcaatttctaacatttttttagatgtttctttagatataacacttcttactttttttggttttactgtttcagttatatttcctttattgtcagtataagattttaccactcttggttgcattaaatctccaccattagctattgatgatatagctgttataagttgtattggagttactgatatagattgaccaaatgatattgtagccaattcaactggtcctacatttttttcgttatacagtattcccttagcttctcctggtaaatctatacctgtcttatccataaggccaaatgattctatataatcatacatttttccaacacctaatctgcttcctaattcaacaaatactgggttgcaagagttttgtactgcttgtttaaattcttgtgttccatgaggtctgtaatgtctccaacatttaatctttcttcctccaacagttacactacctgtacatgtgaatttttctccatctttaattactccctcttcaagagcactggaagatgtaataagcttaaatgtagaacctggttcatatgtatcacttactgctggatttctccacatttgataatagccttttattttatctttatcattatatttttcaagttcttcttgataatatggatatattggcgttcttgagtcattagggtcataatctggttttgatgctaaagcaagtatatcacctgttttagggttcatagctattgcagtaaccttttttgcattatttaactcataagctttctgtactgctttttcagtatagtgttgaattacttcatctatagacaacacaagaccattaccttgtacaggctcataatatttttccattccttgtggtatttctcttcctgaggcatcagtacttactataagttttccaggctttccttttaactttttatcatattgcatttctacaccagatatacctgttgcatctgaagaagtatgtcctaacacatatggcgcaaaattcccatatgggtaatatctttgattatcttctgctacccatattccacttaatttagcatctcttatttgacttgccttatcatcatctatccatctttttacttttacaagagccatattttttttgcttattaaagcgtaaatatctttataatcttcatccaaaatctcagctaccttttcagctgcttcttttttatcttctacttccacaggtttacaccaaacagtatacttagttacacttactgctaattctttcatatttctatcatatatagttcctcttttgggttctattggtatatctcttgtttgttgttctagtgcttttgtactcaaccaatttcccttcataagttgtaggtacccagtcctaataacaaggcaaaaaaacaatgcacatgctagaataagaacgagtaccagccttttcttacttatcctctttacttttctcaaatctattccccctagttatccacatctatatactttatttgtccatcttttggatagtccatattgagcaattccttagcctttagctcaatttcttttattgatgttttttcagtttcttttgcctttagttcctctaatactatctctttttttcttaaatctttttgtaaataatagatatcgtacttcatttccgagatttttgaataaccacatagattcaatattattactgaaaaaattgcaatcagtaaaatgcatttagctcctatttttttcttatttctctttttataattattcttttttttatttttatattcatttagattatgtattttataattttttttcaaattctcaccccgatagtatatagtttaaattttcctctatactatatttgttattaatcatatttcttcctctaaaatttcatcgctaaattaatacactattacacaatctaattgtatttttttctatacacaacaaaaacctataaattcacttatacttttatatgaatctataggttagatattaatttctatttatttttatcacttctagtatttttagataatttcttccataaatataatatgtaactaactatctactctctgattcctaagttctccattatattacttaataccatctatatctatatttttatatctaaattttcattatatatctcaataacaaagaacatttcttatagtgttaattgttttttaattgctttaccagttcaacaaaatatataatactttttaattaattatagtaatcttattttatatataagattattctttagccttataactacttatattttttctgctactcttagcttagcacttcttgaacgtggatttacttctatttcttcctcactaggtaatataggttttctagttattattttcacctcagattctttatcacattggcatataggtaaatgttgtggacatatacaatctgatgctaaatgcttaaatgcatttttcactattctatcttctaatgaatggaatgttattatacatattcttccacctttattcattatagaagaagcatcatttatcatctttgtaattactccaagttcattatttacttctattcgtattgcctgaaaagttcttttagctgggtgaggtccatctattctagctttcttagggatagcttttttaattatatctactaattttcctgtagtttctattggtttgtttgctctttcttcaactataaatttagctatacgcttagcccagttatcttctccataatcttttattatcttagttaattcatcttctgtataagtatttacaacatcatatgcagaaaactcacacctaacatccattctcatatcaagtggtgcatcttgcatataagaaaatcctctatcagcttcatcaagttgatgagatgaaactcctaaatcagctaatacaccatcaattttgtaaactcctattttttctaattcctcttttatattttcaaaattgctgtgaacaaacttcactctactttcatattcactcaatctctcttttgctgtgcttatagcatttttatcttggtcaaaccctataaataatcccttatctgacagtttttttactatttctttagaatgtcctgctcctcccatagtacagtcaacatacacgccatctggctttatatttaaattctctatacactcatttaaaagaactgatacatgatgaaattccatagttacctcccttaaattcactttttaaactattcttcactaatattatgtttatttttctttgataaataaacatgtgcaattatgccaccaataactccaattagacttataacttgtgccattctaagtggtcctaacattaaactatctgttcttaatccctctataaaaaatcttcctattgaatataaagttatataagtaactataacttgaccttcatattttttattttttctaaatagtaataaaactataaatattccaaaatcccatatggactcatataaaaaagttggatgtacctttactccatcaaccattattccccaaggtaaattggtagcacctccatgtgcttctccattaataaaatttccccatcttccaatagcttgtgctaaaggcattccaagtataactgtatcagccatttttaagaagttaatatttttaatcttagtgtatatataaccagctaatattccaccaattaaccctccatgtatagcaagtccaccacctctaaaattaaaaatttgagacatattttgagcatagtaactccaattaaatacaacataatagattcttgcacagattagtccaactggaattgctattatagctatatttaatacatcatcatctttaattcccactctttttgcttcttttattgctattaaagttcctaaaatcattccacatgccataagtattccataccacatgatgtctatgccaaacagtgtaaatgctactctatccataacgtcacctctttgtattaattgaaaatatttccaaagcaatatgctataattacaattaattgtaattatactaaattatgataacacattaatgttaattctacaaaaaatattaaaatttattctacaaatccctacactatattatactaatataattactataaaattttttaaactgaatctctcatgactaaagttacaagtgtacatagatattttttaatcaaaaagattgatgcatatatacatcaacctcttctattccttatctatagctcttaaatttttacctcaatttatataaatatattttataaatttgttttaccaaaataaacatttaaaaacataaataatacttaattagttattcttattatgattaagtttctatttaggttctacaatagaaataacacaatactcttctttaaaatgctcttttaatctttcttcaacttcctcaaaagtaatatctttaataacatctaaataatccaatagatttatatccttaaaaacataagatataaaactattacctataaagtttatagaatcaaagcacttaataaatgaccctatttttttctttttagttctctcaaactcttcttttgataatccttctttttttgatttttctatataatcaagaattatttcttttacttttttaggctctttagaatctccagctattatgctaaaagcataatccacttgagacgaaaatccagctccaaaattttcatttattaaaccttgcatatacaaatcttcatagagcttacttccttttttaaataacatccctacaagtatatcagttacaatctctttacgtaaaagttctttcccttttaaaccaacattactatctttaaaacctatgttgaacataggcatagatatagggaatttttctataacctctttttcttttacactttctggttcttctggataaaatctttctatactcttagagagtttgtctactttgtaattgtttgactttttagttacatctataactttttctacatctaagtcaccaacaacaaataaagccatatttcctggattatagaaagtattataacatttatatagctcttccttagttatcttatatatactatcaacagtacctgctatatcaattctagcaggataatttacatacattgccttcaagcaattaaagtatacattccaatcagggtcatcattgtacatttttatctcttgtgctattatacctttttccttttcaacattttcatctgtaaaataaggtgtttgaacatagtcaattagatgttctaaactctcataaaaattttcagtagcagaaaataagtaggctgtcattgtaaaattagtaaatgcatttgcatttactcctaattttgaaaatttatcaaatgcatctcctccatcaggttgctcaaacatcttatgctctagaaaatgtgcaataccttcattcactctaattttcttatcttctccaattggtacaaattctaagtcatttgaaccataattagtagccaaaatagcatactttttcataaaaccccttttaggcataaaatatacatctaatccattttgcaatttctcataataaacttcttctttcaatatatcattaactattttttccatagacatctcctccattaatttctcaagaagtatacagtatcaagctctatattttttatagcttcaactatatctttttttgtaaccttttctatactagatattatgtcttgtacttcagaatttgtctttgccatagactgagagaaaacaaaatcagacataccacctatattatcagttatagatttcatagaattaactaaagcaagtttactgttttctaattcttcatcagatatatcacctgcttttacactttctacttgtttttttatcaattctacagctttatcataatctttagtttctataccagatgatataaacatgatacttttatacttctctattgaagagaatatatagtaacataaactttctttttctcttacattaacaaataatttagagtgtggaccaccacctaagacattgctcccaactactaaagcataatatttatctatgtctgcataatccacatttgctctataacccataactaacttaccttgagttatttccatttgttcatctataacttttacctcatccacattttttataaaatctgctcttggtatatttataatttcttctctttcaaattttagatttttacttattatatctacaactttatcttcatcaaaattaccttctacaactatatctataggtgatgttttaagtatgtttttataatgttcatataactctcttgaagttatactatctatttcatcttcataaccaaattcacttacactatatctctctcctttacacatagcctcaatacatttatcttgcgcatattcctttttatcatttattattgattgtatcttttctcttaaattctctttttcaatatttaaatattcttctttaaacccaccatctacaacaagcgtattatttattacttcattaaaaaattctactacttcttcaaatatactctcatctaaatacttttcacttatgttaattactttaaaactcaatacttgacgttctccacgttttacagcatcagctcccatagatgaaccatataaatcatctaatttattggatattgctctagcactaggatatttagcgcttccacttgctattattgatggtattagagcattttttgtagtttctttttcatccaatagtctctgaacatataaacttataagattcgatttaaacttttctgtttttatcaaagtaagattaatattattacctaaatttattatttttttagtattaaccatatgtacctcctatttttatttaaacatcaattttaaaattgaaatttatttattttttaattatatatactcacatataaaaaccttctatttaattatatcctttttattattttctaaaagcaatatttttatttaaattaaatgcaaatattatttaaatcaatatgctttaaagtctagtttacaagcttgatatatatgatgtataatcaatatgtatgtctataattaaaacaattttgcaatcctatagattgattgtttaaagttatataaagaatataaaaaagaataagagagaggacgattaatatgaaattaggtatagttggtttgccaaatgtaggtaaaagcacactatttaacgcaataactcaagcaggtgcagaatctgcaaattaccctttttgtacaatagacccaaatgtgggagttgtatctgttccagatgaaagattaaacaaactacaagaattatataattctgaaaaaatagttcctactgctatagaattttgtgatatagcaggtttagttagaggtgcttctaaaggagaaggtttaggaaataaattcttatcacatataagagaagttgatgcaatagttcatgttgttagatgttttgaggatgaaaatgttgtacatgtagatggctctgtagacccacttcgcgatatagaaactataaacttagaattaattttctcagatatagagattcttgaaagaagaattaataaaactcaaaaagctgctaaggctgataaaactttaggttctgaacttgatttattaaaatcaataatgtctactttagaagaaagtaagtgtgtaagaactatggaatttacagaagatgaacaaacattcgtaaattcattggatttacttacatctaagcctgtaatatatgcttcaaatgtatcagaagatgatttagctgataatggagaaaataataaatatgttcaacaagttaaagcatttgcagaaacagaagatgccgaagttgttgtagtatgtgcacaaatagaagcagaaatttctgaacttgattctgctgaagaaaagaaagagtttttagaaacattaggtcttgaacaatcagggcttgataagcttataaaatcttcttatgctttacttggtttaatttcattcttaactgctggtccaaaagaagttagagcatggactataaaagttggaagtaaagctcctcaggcaggaggaaaaatacattctgatatagaaagaggatttatcagagcagaaacaatagcctttaatgatttggttgagcatggtactatggctgctgctaaagaaaaagggttggttaaattagaaggtaaagaatacatagttaaagatggagatgtaatattatttagatttaatgtttaaaatgattaatcatatacactttgactattatatataataactaaaaaactaagattataataatacaatattatcttataataattatatagaatttaaaaataaaagaagagtatttcaaatgatttgtataaattattatgaaaaactctttttttgatataataaaattacttacatatataacatttaaatttataaattatctttttattttttaaaatatgtataacacacctatagaaattactattattactatctaaagtattttgctataatcccatatactcttacctcaaaaacattcaaatggaaaaaatactacatattaataaactttgcccaataattcctaaaataatatcctaacaatgatttatgtttttataatagtatatttttacataaaaaagtgaacattgattaacaaagttcacttttttataaatttttatgttataattcacaattttatttaatttgtttcttttctatttaaactatatctatctaatattaatttttcatattcttctattggcattggtctagcaaataaaaatccttgggccatatcacaacctataaaccttaaaaactctgcttgctctacagtttcaacaccttctgaaacaacttttatatcaagttgctttgccatttgaacaatacttgaaactacaatttgactcttttttgcatttcccactgttataaagaattgcctatctaatttcaatacatcaattggcatatctttaagcatatttaaagaagaataaccagaaccaaaatcatccatagaaattttaaatccaacagatttcaaagtttgcattattttaaataatatttttgtattgtcaaatattgcactttctgtcaattcaatctcaattaaatttggttcaatttcatattcttttgttattctttcaagctcagaaataaaacctggattctcaagatgtactcttgataagtttattgatataggaaatgtggggaaattttcattttcccaacgtttaaaatttttacaaacttgggcaaatacaaacatatccaattctgttataaaaccatttttctcaaaaataggaataaatacacctggacttattagaccttttttgggatgttgccaacgtacaagcgcttcagcacctacaattttagtagttgataaatcaaccttaggctgtaaataaactttaaattgttcattttttaaagcatcatgcatttcttgttcaatatcacgttcttctatgagagtttcttttaaattttcagcataaatctcataaacttttaaatattttctttttactgtagtttttgcaatcatagctttgtcaagacaggtagaaatatttgtttctccctcttcaacaaaatatacacctatggatggaattaaattgagttctactcccaaacttgtttttatcattgacaattttttacgtataagttcacatatttctataattgactctctattatttttcttttcaaatattatagcaaaattgtcatttgaaattcttgaaaatacagattgctctttaaatatattcttaattatctctgctatttcctttaatactctatctccttcttcatacccaaacctatcatttactagcttaaacttatctatatcaaaataaattaaaactagattctttttctcatgagaggataaaaattttcctccttcaagattaaatttatttgaattgccaatacctgtaacgttatctttaaaagcaaattcttccaatttttccttactctttttatgtataaatagtatataaattgttaatgccgtaaagattataatcaacactacacatgctgataatgtaagttttataatagcgtatgatttctcagatatagcagttttaggaacttcagaaaaaagataccaatcattgattcctattggggcataacttaaataatatccttttccaaacatactataacttaatgaacctgatttaaagttttttatatttgacttcatattattgatactagattttgatattgaatcacttctgccaatgtaagaaaataaattttctttagtagagttggcgtttttgctgcttggatttaaaacaatattaccattacttctagctatataagaatatccttttccattaaatgtaggtacagaaagtattttttcatacaacttcgtactatgtgtggcaaatataactcctttaacctcattatctttataaattggcacagaatatacattaatattactattggtatttttatcatcttctattacatcttttaatttttctgttataaccacttctccttgcattgattttaagaaataatctcttttagagaagtcttctatataaccatctgtagtgtatgctgtaccatttggtaaaataactcccattcttttaaatgaactattaatagcttgtctttttagtatagaaaggatattatctacttcaaaagactcttctccctcaataaatattgaaattgactctagtaactttatatctccattaatttgtttttttaacacattgacgctttgatttgctatttctgaaagatattgattcgtttcttcacctaatgtcttattcaaccttgaaccataaatcaaacaggaaattgtaattactaagatacttatgacagcaattatggacaaaccatacctattattttttgcatcacttaacattatgcttcctgcctttctcgaatctatgtatgtataatcattatcttatgacaattattgtaaacattttataataatacttatttttccatatttactgtaattatacaaaattataaactttattacaacaataaattaattaatatagatattagggtttatattattgcattatctattttacaatcatttacatataaaaaaatgtaatatcaaagtgaaacttgatattacatttttgttcttgtattttgtttaatttttatgctacattttacttaaacactcatttgcaacttctttatcatcaaaatgatgcttaactttacctataatttgataagtttcatgtcccttacctgttataattacaacatcatccttttttgccatacttatagcttctgctatagcttgttctctatcaacaacaacatggtaattttcttttttcttgtcaattccttcaagtatatcttttattattgcctctggttcttcagttcttggattatcagaagttataatacataaatcagaatatttttgtccaattgctcccatcaaaggtctcttttcagtatctctatctccaccacatccaaacacagaaattatttttccttctgcaaattgttgagttgtctttagtacattttcaagtgcatcaggagtatgagcatagtctacaattacacttatacctttatcatttggaactgtttcaaaccttcctgatactccattagaaagtctaagaccttctttatatattggtttaggtatgccaagtacatagcaagcagctataactgctaaagtattatatactgtaaacattcctggaactggtataaatattacttcttcatatgaaggtgttattaatctataagatactccatccgaatctgattttatatctctagccataaaatcagccttagtatcaacaccataagtgtaacaaggtacatttataccttttatattttcatatatcttttttccaccttcatcatctatgtttattatatttgccatagtagtcttaaaaaataatttttcttttgcttttctataatcctctaaatctttatgaaaatctaaatggtctggtgttaaatttgtaaatatgcctagtttaaagtctgtttcatcaactctatttaatgccaatgaatgtgatgaaacttccatcgcacagtagtcacatccattatccaacatattattaaaatgatattgtaaatctatactttctggagttgttgaattggaaacaatgtctttttctccgtcaaaaatttttatagttcctataagtccaactttattcttatttaaagttaatatctcatttagtatagtagttatactagtttttccattagtacctgtaactcctataacgttaaatttctgagatggatgattataaaaattatcagctacttttgccatatcttttcttgtatcttttacctttataaatgtacatccttttatttctacatcttcttcaacaagaaatgcacttgctcccttttctatggcatcttttatatacttatgaccatctgacacaaatccttttatacatataaataatgtaccttttgtaacctttcttgaattatattgtacattattaatatctatatttaattcacccttgacattgattatatccaacccctgtataatatcatttaatttcataaatgctttcctccctttaaactctttctgctaaaattacactacatataatattatattaagaattttttactatgtgaatggttaaaaatgcttgaaatattgcaaaaaatgctctataattttctataatataactgaggaaaggtcttctataaaaactatggataataaaatcgggtacttaaacgataactttaaaatatttaatattagagataaaaaagatatacaatttgaataccataatcatgattttaataagataattatatttataaatggaaatgtaacttattttgttgatggtattccctataaactaaagccttgggatatactctttatcagcaataatgaaatccataaaccagttatagattcaaatgtcttttatgagagaattgcaatatggattagcccagaatttatgaaaaaaaatagtgatgctactagtgacttagaaaaatgttttaaaatagctacggagaataaatgcaatagattgcgtttaaatatacatgatattgaatctattaagagttttattgagcaaataaatatttccgaatccaatactgaatttggaaatgaaatattgagaaatgcattatttatacaacttatgatattcttaaacagaattttcctaaaaaatgaaaatatggaatcaacagaagacgttttttatgatgaaactattaagaaagtattaaactatataaattcaaatatagatgataagctttcaatagatagcatatcgtctgaattttttataagtaagtattatcttatgagaaaatttaaatctcatactggaacgtctatacacaattatatagttcaaaaaagattaattttagcaaagtcactaataaccaatggttaccttatgagtgaagtttgtaataaatgtggattcaacgattattctagttttgtaagggcatttaaaaaaaactacggtgtatctcctaaaaattatataaacaataaaaatcctttagatattactcttttagatgaatagataatttatgtaaattttattttaataaaaacttgaagtattagtgtatttatcttactaatacctcaagttttttaatgttttaaaatatatcaaaatataatgatatatatttctattacttaaaatatatattaaataaattgcatgttaactgaacctatttatatatttattaaatctcacataacttttagttatactatcatatagctatcctattttttcaatatcatatcttaatatacttactctgttctcctcttttgctgtagttattccttttttaatgcttaatttctgattttgttctaaattcgtaaatactacaggacttattgttgatagacaatttttttcaatatattctaagtccattttaactaatttttctcctgcttttacttcatctcctacattcacaaatacttcaaatccatttccttctaaatttacagtttctatccctaaatgtataagtatttctactccactttttttggattttattattattgcatgcttagttggaaatataactccaatagttccatcaactggtgaataaatcaatccatcactagatttaattgcaaatccatcccccatcagtttacttgaaaatacagaatctggcacttcttctatatctaatatctctccatttgttaatgaatcaatcttttctactaaagcattttccatattggcaacttccatattttttttcactttatttttatcaacatttttagtaacagtactttcaacctttgtttttccctctattatatcttttatatcagactttattgaatccgattttggtccaaatatagcttgaacattgttgccaataaccataacacctgctgctccaagtaatttcaatttttctttatctactttatttatatcatttacaaccaatctaagtcttgttatacacgcatctaggctctttaagttgtctttatttcctaaagcaattaaaatctctgatgctaattcattcttagacatttcaatgacttcagcgttagtttctgactcatcttctcttcctggtgtctttaaattaaattttcttatcataaatctaaatacactatagtataatactgcaaaaccaatacctaccaagatagccaagtaccatggagttctattaggaagaacaccaaataataagaaatctattaatcctcctgaaaatgtgaatccaattttaactcctaataattgcataattgcgtatgataaacctgaaaataaacaatgtattgcaaataatactggtgcaacaaataaaaacgcaaactctattggctcggttattcctgttaaaaaagaggttaatgctgctgatgccattatacctgctacaaattttttcttttctggctttgcttcatgcaccatagcaagagctgctgctggaagaccaaacatcataaatggaaatgcacctgtcataaaagtacctgctgtgaaatttactccatctttaagttgagcaaagaatatcttttggtcacccattacaagctcaccagctttatttacatattctccaaattgataccaaaatggattatggaaaacatgatgcaaaccaaatggtattaatagtctttccaaagaaccttccataaatgctgctagtgtttgatttgcttctataacattttttgagaaactaagtaatccctcttgtattggaggccaaataaaagacaatataattcctattgctatagcaactaatgaagtaacgattggtacaaatcttttacctgcaaaaaaacctagatactgaggtaattcaattttataaaactttttataaagataagcagccactatccctataataataccaccaaatacccctgtttgaattgttggtattccaacaatacttgcatacatagaattgtctaccatatcttctgtaacacccgccataacacccatagatgtattgagaattaaaaaacctactatggctgccaatgctgcaacaccttctccttcagttaaaccaacagctaccccaactgcaaatataagtggtaagttattaaatataatttgacctgaactttccattatacttattataagttgaaatgtaggattcgccaaagctggaaaatgagacaacaatgcgtctcctgctaaagcattactcacgccaagtaatatacctgctgcaggaagtaatgcaactggtagcattagagattttcctactttttgtaaaacaccaaatacttttttcatttacttttctctccttattattttatatttttttaaataaaaaagacttaagtttataaaaagttacattagtatacttaattctaaaattaaacttatgttaatataaataaacctatattaacctaatttcagaattaaaaataaactattataatttttttataaacataagtcttgcctgcattatcagtaacaatcttaatgttttaaaattattattttatattaaattttaaataatatattaaaattaaacataatatattaaacctatacattctgtattaaactactctttattataaattcagtacagatataactcttttgatatgtaatgttaaataaagtagttcatcttgacttacatagtaatcataattcttttctacatgagtttttattttatatgcacaatcataatccttttcatactttactttaattatatctataatttcattatttgtatcattgattttttctttttttactaatcgttttgcaaagaattttaaatgagtcaaaagcctatcataatttatatcatcttctttaaattcaactctataataatatcttataatatttagtatgtcttttacaattttagtaattaacagtgattcctttgaacttcccttatagtttgaatttactatatgcattgctataaaaccagcttcatctactggaaatttcacatcaaattctttatttatataatctacagcccatttaccaatctcatattcttttttatgtattctttttatctcatgtagtaaatcattctttatagttatattttcatgatatcttttaattgcaaatgcaatatggtcagtaagtgctacataaatatattcataaagcttagtattcaaattctcctctgcataagcaattatttcagtactaatctcaaaaaatttctcatcaacctggcttgctagtttgctaattttatctaaaaagctttcatcttgtattacaaaagttctttcaattttacttttatctatttcttgacctttctttttttgaaacccaatcccacatcctgttagtattaattctttttttatattttcatctaaaactaatacaacattattattataaatttgttgaataatcataatcaatatctctcccaaaatacaatttcccttattcataaaaaaatacctaaattaagatacaattcacctgtataccttaacctaggtattgcctgcttaccagtaacaatccagcttgttaattcttatatattgtattcaatttatggttttattctattataaataaatatatatgtcaagtaaattattgaaaactatttcctattttttagtattatttttaacatcaaaaatcaaattttattccattatatttatgattctatcatcatcatttaataaagattcaccttcaagtatactcatcatatttttaggaaaatttaatccttgtgtgattgattttactgctactaaatcagttgaagatattactgctgccaaagcaagtgaaacagataatggcatcctaggaataagaaaatgtataaagattccacctgcaaacacggttatcaaaactaaaccaaatgcaagaagcaaaattggttttctaagctctagtaactcttttcttgatacattttgtccttcactgaataataatggagctatgatacatattacaaatatttctggattaaatgaaaatgataatttaaacggcaaaatagacaatataatccctagtacaatttgatatattgcaagaggaatattactccactttttgctaaatacagttgaaatctttgtacaaaccaataatcccaacaatgttactaaagttgacataactacctctcttttcaataataatattataaattaaacttatatatcaactaacttaatattaacaacatgaaatcccatcttaatcaaaaaaattttcagtttattctattattcttattatatacatcaaatttaatttttgaaatatctatactagatggcatgcaacaaaatgatttcttgatatttcttttaaaactggaatctcttttttgcatatttccttacaataagggcatcttgtatgaaacttacatccacttggtggatttgttggagatggtatgtctccttttaatataattctatttttcttaattgtagggtcttgtactggtactgcgctcataagtgctcttgtatatggatgttgagaatgtaagtaaagttctcctttagttgcaatttctattatagaacctagatacataacacaaactctatgtgcaatatgatttactacactcaaatcatgagatataaataaatatgagagtttatatttatcctgtaaatccataagtaaatttataatttgagattgaatagaaacatctagtgcagaaacaggttcatcacaaactataaattctggatttaatgctaatgctcttgctatacctatcctctgtctttgacctccagaaaactcatctggttttctatttaaatggtacttagaaagaccacaactttctacaacatttaatatattatcttttatttcattctttggcactaaattatgttctataactgcctctgatattatttgttccacatttaatcttggatttaatgaactatatgggtcttgaaatatcatttgcattttgggtcttaactttctaagttcttccttctctaacttatatatatctacaccattaaattcaactttaccttcagttttttcaattaatctaaggatggttcttcctgcagttgattttccacatcccgattctccaactatagccaaagtttctcctttttttaaatcaaaagaaattccatctactgcctttacacatttaatttccttatcaaataatccagatttaacttcaaagtactttttaagaccttctacttttaataaactctcttcttttttcaattatatctcctcctttttatataaccaacatgcaatactatgaccactattcaattctattaaaggaggtatctgagttctacatttatcacatactttttcacatctatcactaaaataacatgaatctggtattccaattggatttggtacttgtcctggaatcgaatacaatcttttatctttgttttttccaagaacaggctttgattttagaagtccaatagtataaggatgttttggatttttaaataattcaacaacctctgccacttctataattttaccagcatacatcactaatactttgtcacacatttctgcaactactcccaaatcatgtgtgatcatcattatagatgtgtttaatttttcttttatatttttcattatatctaaaatctgagcttgaatagtaacatctaaagctgttgttggttcatcagctataagtaattttggattacatgataaagccatagctatcattattcgttgtctcataccacctgataattcatgtggatatgaattatatatttcttcagctcttggtatttctaccagttttatcatatcgattacctttttcttagcttcttcctttgataaatcttgatgtatcataataccttcaatgatttgacttccaacagtgaacgctgggtttaaagatgtcattggttcttgaaaaatcattgatatctcattccctcttattaccataagttcatcttcattcatctttaaaatgtctttgcctcgaaagattatttctccaccttctatttttgatgttggaagtaacttcatcaaagacatggctgttacagacttaccacatcctgattctccaactattccaatagtttcaccttcatttatattaaaacttacttcatttacactctttacaatccctttatctgtatgaaaataaacttttaaatctttaacctcaattagtgctttactcattattttctcctctcagcaaaattacttaaaataacatacaccttttgattgtattttataaaaatttaaattacaacattttcttacattttattatttttttctattaattataataatataatagttaatttctatatatattgatttaataatgattactattatacaatgaaaaatatgtgttaaatattattttatggaggttttataagaatatgaaatttaaaaaattggcatcattaatcttagtttcatcattaatgcttacatttacagcctgtgcttccaatgataaagacaagtctagtggaagcaaatctggtggaactgttgtaatacctatggcaagtgacccagatataatcaatggagcttttgcaaacgttaaagaagactctcttgcatcaaatatagtttatgctcctctttatacttatgaaaaagggaatttagtaaattatttagcagaaaaagtagattttaaagatagtaaggaattaactataaaattaaaatccaatttaaaatggcatgatggaaaaccaataactgctgaagatgtcttatttacatttaatacagttttagacgaaaaacaaaattcaccatcaagacaatacttattggtgggtgaaaaaccagttaaagtagaaaaaattgatgatttaacagttaagattactttaccaactgcaagtgaatctttcttatatggtatatctaaaatttctccaataccaaaacatgtatttgaaggagaatcaaatatagctaagtcagaaaaaaataataatccagttggttctggtgcattcaagtttaaggaatggaaaaaaggtgaaagcatagtatttgaaaagaatgcagattattttggtggagaacctaaggcagattctatagcgctaaaaataattcctaatgaagcatctcaagaagcagctttaaataatggcgaaatttcacttatgaagacatctgctgaaggatatgaaaaggcaaaatcaaactcaaacttacaaacttatacttatagtgaagaaagattaaactacattgtatttaaccaaaatatatcaaacatggctaacaaagaagtaagacaagccttatcatatgccttaaatagaaatgaaatgatagaatcagcatatggaaaagaaggttctgtacctgctaaatctatattagttccagaagcagacttctatacagaagaaggtgttgaaggatatgaccaagatacaaataaggctaaagacttattggataaaagtggtgttaaaattgataaattaaaaataggttataacacaggtagatttgggcataaaaactatgccttagtagctcaacaagagttgaaaaaaattggtatagaagctgaaatagttccttatgaaagtaaggcattctttaatatactatttagtaatagcactgaatgtgatatgtatgtaaatggttatgcttggggattagaaccaaacccatatagaggtatgtttgaaactggtcaatattgcaaccaaactaaatattctaatgctgaaatagatgctttatgggaaaaaggatttactgagttaaacaaggaaaaacgtaaagaaatatacaaacaaatacaacaggatatatctaaggatgcacctatttacactatagattatgaacaaaatttaatggcagctcaaaaaaatctaaaaggaataaaagatgctaaaccatctcctgcaatattatttgaagattggtctaaactgtatgtagaataattgatgtaaaattttatattattaattagaaaaggagatgtctaaaaataatattgttttattattttaaaacgagacatctcttttaattaggagaatttacttatgttaaaattaatattgaatagagtaaaagttttaatacctatgttaatcttaatatctatattatcatttggacttttagaattagctcctggtgacccagcagatgcatatataaatcctttaatgtcttcacaggatattgaaaatataagggttaatatggggcttgataaaccagtatatataagatatttaaactggttgaaaaacactttaagtggaaacttaggtatttcttatataaaccatatgcccgttacagaacaaattatggaaaaaatgggaaatacatttattcttatgggtacttctttgatattttcaatattggtagctatacctcttggaatatttttagctgtaaataaaaattcaataactagtaaagtatcatctgtttttaattatataggtgtttctatcccttctttttggataggtatgatactcatttcaattttttcagttaaacttaacattttcccatcaggaggtatgcatactattggaaatgatagtattggagatttagtaaaacatttagttttgcctgtaataactttaggtctatataatactgctatttttacaaattatgtagaagctagtgtaaatgaacaattaaaaaaacaatatgttattacagcaagagcaaaaggattatcagaaaaagtcatactatttaaacatgtcttgaaaaattcactgacatcattggttacaatcctaggcatgagtatacaaaaattagtcactggtgcatttgttacagaagtagttttctcttggccaggtatgggaagattaatgattgattcaattttttcaagagattatactgtaattatggcaataactatgttatcagcactatttttaattttaggtaatttagttgctgatatactatacttattaattgaccctaaaataaaatctagcaaaggaggattctagttgtgtttacaagtatcttaaaaaaattaaaaaaagataaatcctttgcttttgcatgtattactcttagcataataatcatattaattatagcttcttttatattaaatatagactctaatgcaattgatactacttctaaacttcaagaacctagcttaaagcatatctttggtacagacgaacttggtagagattacttctctagagctctttatggtggaaggatttcacttagtgttggtattttatcaatgcttatctctgtagtatttggtactgctgtaggtgttattagtggatatattggaggtaagctagaccaattcttgatgagattagtagatatgcttatgagtataccaagtttcttagttttgattgtattaaatacttatctaacacctaaagtttccactattatactaattattggattcttaagttggatggaagtttcaagaattgtacgtggcgaaacattaaaaataaaggaaaatgaatactgtttagctgctaaagctactggtatcaagactagaaatatactattaagacatatagttttaaacttaaaagagactattgtagtcgctggttcgttaaatattgctaatgctatcttaactgaatccgctcttagttttttaggtcttggaatccaattacctcttgcatcatggggtaatatgcttcaagatgctcaaagacatatttttgacaagttatatttagctgtatttccaggattacttatatttttaacagtcataagtttgactataataagcaaaaaattttctagtaatacttaacaaattttatatagaaaataaaaacagtgattatctaaagatatacactgtttttatttttcgtttaaaaaatacatattttgtatattataactttaaatactactctaccatgttatgtaaagcctattattgctctcaaacatatagatgaaaaactaatagtttattgtaataaaaattgatttatttatttgttattttaataacatttttaagagttctttttactaaagaaatctataataaatttaaatacatgttggtctacatggctataacgttcttttttaggtctacatagtataactttccatgtaataggatgattaaaaggcttttctataattttgctattttcaaaaaaatcatgaactggtgatggtaaaattgttataaaatcagaatttgtggttgatagcaacaaaaaatcccatgaaccagacattatatatctttttaacttaacattttcatcagtaaatttttgcattagcttatgatgtatcataaaagtaggattaaatattgcaagtaattgctcattcaaatcgttccaatctatcttatccttcttagcaagtggatgatttatatttaaaaatgctgtaagttcatcttcttgaagcacatgttcagttactacacttttatcaattttatgtggatgtaacagtactgcataatctagttcctgcaagataagcattctatttaagtcatatgcacccttctctactatatcaaattctatatctggattatttgcaactaactgtgcaactacatctgaaaatgctattccaagtataagtggaggtattcctattctaacttttcctttaaattgaactgaatcttctcttaaatcttccatcatatttttgtattcatttataatatgttctgcatttacataaaatctttctcctgctggtgttaacccatttaacctacctttatacctttcaaataaatatacatcttcactttcttcaaaattttttataatttgacttaatgctggttgagatatgtgaagtgtcttagatgctattgataaattaaaaccagatttcactatttcaacaaaatatttcaactgttttatatccattttaaacccccttccccaaaagtataatttagattatattttttcttctaatgatattttataggaaaatcaacataatttcattaatattttaacaaaatatttttctaaatctactataaatttttatcctataaatttttcttatacactatataaaaaattagacttagacaaaatgcttttttcgccgtaatctataattagaaacaggaaaacctaaagcattaggaataaaagtaattgaaatacttaaaaacaagcttgtattaaaaaagtactttattatagtgttccctaatttctttattcagaaaatttttaattatcattcaagaaaggtaactattagatatgaaagatgtagtaatcgtatcagcagtcagaacacctataggaagttttggaggtgtatttaaaaatacttcagctgttcaacttggaactatcgctgttaaagaagcgatatcacgtgtaggacttaatttatctgaaatagatgaagtaataattggaaatgttcttcaaacagggcttggacagaatgttgctaggcaaattgctataaattcaggtataccaaattctgttccaagctacacagtaaataaattatgtggttcagggcttaaaagtgttcagctagctgcccaatcaatcacatctggtgaaaatgatgtggtaattgcaggtggtactgaaaatatgagccaagctccttatatcgttccaactgctcgctttggtagtaaaatgggtgacataaccatggtagatagtatgctaacagatggccttattgatgctttcaatcagtatcatatgggaataactgcagaaaatattgcaactaaatttgaatttactagagaaatgcaagataaattggcattagaaagtcaaaataaggctgagaatgctataaaaaacaaccgctttaaagaagaaatcgttccagtagatgttttaatacgtcgaggaaaaatagaaactattgataaagatgaatatcctaaattaggcatgacatttgaaggtttagctaaacttaaacctgcattcaaaaaagatggtactgtaacagctggaaatgcctcaggtattaatgatggtgcggctatgttaatactaatgagccaacaaaaagcagacgaactaggtattagaccacttgctaaaataaaatcctatgcttcagctggtgttgaacctgaagtcatgggtactggtccaatccctgcaactagaaaagcactgaaaaaagctggacttagcatcaatgatatagacttaatagaagcaaacgaagcgtttgctgcccaagcattagctgttaaaaatgaacttcaaatagattcatcaaagttaaatgttaatggtggtgcaatagcattaggacatccaataggagcaagtggagctagaatacttgttaccttaatttatgaaatgcaaaaacgtaaagttgaaactggacttgcaacactttgtattggtggtggtcaaggaatatcaatggtggtttcacgataggaggaaatatgaataaaatagttagcattgatgaagctctatctcatgtaaaagatggagatacaataatggttggtggattcatggccaatggttcaccagaaaatttaattgattatttatgtagtaaaaatataaaagatttgacactaatttgcaatgatactggctttattgacaaaggagttggcaaaatggttgtaaataagcaatttaaaaagataattgcttctcatgtaggattaaataaagaaactggaagacaaatgaacaacaatgaaacagatgttgagttagttcctcagggaactcttgctgaacaaatacgtgcagctggttatggtctaggaggtatactcacaccgactggtattggtactcttgttgaggagggaaagcaaaaaattgttgtcgatagcaaagaataccttcttgaaaaaccaatttatgcagatgttgctcttctatttgcatcaaaggtcgataaagcaggtaatctagtttataaaggctctatgaacaattttaataatttaatggcatctgctgccaaaattacaatagttgaagcagatgaaatcgttgaaattggtgacattgacccaaatgaagttaatacaccaggtatttttgtgaattacatcgttgaaggaggtaatttataatggataaattagaaatgcaagaatatattgcaaatagagtatctaaagaattaaaagacggagccgttgtaaaccttggaataggtctaccaaccaaagtagcaaattatattccggataatgtaaacgttatcttacaatctgaaaatggctttttaggtttaggttcagccgaagatggaaattcaagtgatgaaactattgtaaatgcaggtggtcaaccagttactatacttcctggaggatgtttctttgatagtgctacttcttttggaataatcagaggaggtcatgttgatataactattcttggcgcacttcaggttgacaaatatggcaatatagcaaactatatgattccaggtaagatggttccaggtatgggtggagctatggacctagtaactggagctaaaaaagttattgtagcaatggaacatacttcaaaaggttctgcaaaaatattaaataattgtactcttccacttactgcaacaaatgctgtagatttgatagttactgaaatgggagttatggaagtaacatcagatggaattttacttaaagaaataaatccagctttcacattagatgatgttatttctgctactgaagctcctttaatattgtcagattcattaaatggaaaaatatctgttgtttaaaataattaaaactagaaaataaaaatctcttagacgtattacatataaatttgtattgcttaaaatattaatataaaaataaaataaaattggaggaaatgaaaatggttaaagataaagttgtattcgtaacaggagctgcaagtggaataggtaaacaaatagctgaatcgttcttaaaaaatggtgctaaagtaatgttctctgatataaatcaagaagctttaaataataccataacagagttacaaaaaaaaggttatgattgcatgagtgtaaagtgtgatgtaactaaggaagaagaaattaaccacgctatagataaaactgttgaaaagtatggcagattagatatattaataaacaatgctggacttcaacatgtttctatgatagaagatttcccaactgataaatttgaatttatgataaaaataatgctgacagcaccttttatagctactaaaaaagcatttcctataatgaaaaaacaaggctttggtcgtataataaatatggcctcaatcaatggtgtaataggatttgctggaaaggctgcttataactcagcaaaacatggacttattggactaacaaaagttgctgctcttgaagctgccgattctggtataacagttaatgctttatgccctggatatgtagatactccacttgtcagaggtcagtttaatgacctttcaaaaactcgtaatataccattagaaaatgtcttagaggaagttttgtacccacttgtaccacaaaaacgcctattagatgttcaagaaattgccgactatgctatgttcctagcaagtgataatgctaagggtattacaggacaagcttgcttactagatggaggatatactgcacaatagttattatatttagggcttgaagaaagtattcttcaggtccttctactaaggagggatatttatgagtattatcgcaccaattggtataattattggtatcatagctattatatatttttcagttaaagaaattcatataactatagctgctccaatagcaactttaatagttgttctcttaaataaaatggatgttgtaacatcaatgctaggtgctgacaaaaacaattatatgggtgcacttggaaactatataatgagttattttgcaatattcttattaggctcaatacttgctaaatttatggaagaaagtggagccactgtatcaatagctgattttattttaaataaagttggctctaatcatccttatagagttttagttgctatatttatagtaagttttatattaacgtatggtggtataagcttatttgtagttatgtttgcagtcattccacttgcaagaactctatttaaaaaacttgatatttcttggaaccttattcagataccactttggcttggtattgcaacaattactatgactataattcctggaacaccagccattcaaaatgttatacctattcaatatctaaatacgtctcttactgcagctactataccaagtattgtaggtagtataggttgtgctacgtttggacttgtctatatgaaatatgctctaaacaaaagtattagaaaaggtgaaacttacgcaacttacacttcaaaattagaagaagaatctttagatagagaattaccaggattttttgcaagtatttttcctctattagcactcgtaattatagctataactggaagtacttttggttcagaatttatgaaaaaaaatgtaatttacatagctttaatagttgcaattcttttatctgcttttttattccataaatttctatcatctaagatacagacattgagcataggtgctagtggttctataggtcctatatttgctacatcttctgcagttgcatttggagcagtaataatggctgcacctggttttgatgtatttagcaaacttataatgtcaataccaggtagtccacttataagtcttactgttttgacttcaacaatgtcagcaataacagggtcctcttctggtgcattaggaatagtaatgccaaactttgcagattattatttaagtactggtctaaatccagaattaattcaccgtgttgctacaatagcctcaaatatactaactatagttccacaaagtggtgtttttcttacattcttaagcttatctaagttaacacataaaactggatttaaagaaactttcattgtagttgcagttggttcactaatagcagaaattattgtaattacattaggattactaatgtattaatataaaacaaattaaaattcataatatgaaaggtggtgtctcaaagtgaactttttacttaatgagacactctttttgtatgaaatcaaatatattttaatcatttcaacaataaaaaagaacctttctctattttgagacaaaccctttttattccttaaagatttaaacaattataatttgttactaatacgaaaacatctattgaataaatttaaccaaataaaaaaaaatttatcataactataaatttacgttatggaattattataaaaatattattttctctaagtaagtaattccatactatacaggcttttaatacaaattttcaaacacactgaaatatacctatttattccatatatatcttttttacatatctttacagtaaaaaaagtcttaatcttatgttagtatagattcacgggtaccccctacactaaaggttacaaatcagtaacatttttagaatttttagattaagaggtgtttaatgatgagaagaaatataccaacaaaattaaaaactatattagctttaggagtgttaactttagcaacagcttcaagtgctgttactgcaagtgcttcatcacttgaaaataatgtaaatataagtaacaaaagtttagtatatagtaatactaaatacaagttttctgcaaaaccaaattgttctgtaaaaccagaacttaaacctgataaagataactcttgtaaggataagaatcataatgacaagaattgcaacaacactaataaacctgaggacaacaataattcagactctactaataagcctgataacaataaaccagagtctaataaacctgaggacaacaataattcaggctctactaataaacctgataacaataaaccagagtctaataaacctgaagacaacaataactcaggctctactgataaacctaataacaataaaccagagtctaataaacctgaagacaacaataattcagactctactaacaaacctgatgataataacaactcaggctctacaagtgaaaatttttcagcttaccaaaaagaagttgtcgacttagtaaatatagaaagagctaaagctggattaaatcctcttactcttgattcttctatatcaaatgttgctacaaaaaaatctcaagatatgattgataacaactatttttcacacaattctccaacttatggttctccatttgacatgttgaaaaaatttggaataagctataagacagcaggtgaaaatatagctatgggtcaaaaaactcctaaagaagttgtaaacgcatggatgaattctgaaggtcacagaaaaaatataatgaatccaaatttcagtaaaataggtgttggagtagcacaaaaaagtggtggttcaatttattggacacaaatctttgtaggataaaatactctttttccatgcatatcaaaagagtatctctaagtgataaaaaacacaaatgagatactcttttgtatctattttaaaattatcaaatccaaatatacatactataaatattatttgttctcttaattttagtgtgtagaacaatatataaaaagtattggcaagatgaaaatggaaaacttaaaaagatatttaataggtaaaaacaggatcttaatatcttcataaaaaaaggctgtctcaaaatagagataaggcctttttcattgttgaaatgattaaaatatatttgatttcatacaaaaagagtgcctcatgaactaaaaagctcactttgagacactctcttttatcaattctatataagcattataatactttaatattattcagctaattttttgtatccttcatatctttctttagcatcagcttcagctttagcaaataatccatcagcttcctctgggaattgtttagctatagcagaatatcttacttgtgcaagtatgaaatctttgaagcttgcagttggttcttttgaatctaaagtgaatgggtttttaccttcagcttttacttctggattgaatctgtataaatgccagtatccgcaagcaacagcttgtgcttcattagccacagttcttcccataccttcttttaatccatggtttatacatggagcataagctattattagagatggcccatcatgtttttcagcttctaaaacggctttgataaattgatttttatcagcccccatagcaacttgagctacatatacgtttccatatgtcatagccatcattcctaaatctttctttctagattttttacctgaagcagcaaacttagccatagcagcagctggagtagctttagaagcttgacctcctgtatttgaatatacttctgtatcaaatacaagtacgtttacatcttcaccagatgcaagaacatggtctaatccaccgtaaccaatatcatatgcccaaccgtctccacctagtatccattgagatctcttaactagataatcttttctatcttttatagcttttactaattctttagctttttcatctgtacaatcacaagctggtttttctaataattcaacaaccttagcacttgctactttagaagcttctccatcatttctagaatctaaccactctgtaaatactgctttagcatcttcacagatatccatagaaactaactctgtcatagcatctactattttatttcttatttgcttaacagctgtgtacataccaaatccatattcagcattatcctcgaataaagaatttgcccaagatggacctttaccttcatggttacaagtataaggaattgatggtgcagaagctccccatatagaagaacatccagtagcattagctatcatcattctatctccatataattgtgtaactactttaatgtacgcagtttctccacatccagcacatgctcctgaaaactccattaatggttgtctaaattgacttcctttaacagtatttgcaggcataacatcaacttttggagctacttcatcaggatttactgcaaatgcccaattatctaactctgtatcaagttgagtatctattggcttcataactaaagctttttctttagctggacatatgtcagcacagtttccacatcctgtacagtcaagtggactaacttgaattctatattttaatccttctaatcctttacctaatgcttttttagcttcaaatccttctggagcattagctaattcttcttcagtaactaatactggtcttatacatgcatgaggacatataaaagaacattggttacattgaatacagttatctattatccattcaggaacatcaacagctataccacgtttttcataagctgcagtaccacaagggaatgttccatcttctataccattgaatgtacttactggtaagttgtttccttcttgtgcagtcattggtcttagtatattttttataaattctggttctttaacttctcctttatctgcatcaacagcattttcccaagaagctggaacttcaactttaactaaagcatttattcctgcatcaacagcagcatagttcatattaactattttttcaccttttttaccataagctttaactatagaatcttttaagtatttaacagcatcttcttctggtattatttcagctaatttaaagaatgcagattgcattatcatgtttattctgtttccaagacctatttcttgtcctagtttaacagcattaactgtatagaattttatatcatttttagctatatattgtttcatatgagctggtaaatgttcttcaagtcctgcttggtcccatatagtgttaagtacaaatgtaccaccttttttaagaccttttaataaatcatattgataaacatatgattgtttatgacaggcaatataatcagcttcatctattaaataagtagctcttattggagtatcaccaaatcttaagtgagacatagttataccaccagattttttagagtcataatcaaagtaagcttgagcatatttttcagtatggtcaccgattattttgatagcttgtttattagctccaacagtaccgtcagaacctaatccccagaacttacatcttatagttcctttagaagctatttttattggctcagatggagttaaagaagtattagttacatcatcaactatacctactgtaaatccatttttaggttgttctgaaactaagttatcaaaaacagtttttatatctgaaggagtagtatcttttgaacctaatccgtatcttccacctattatcataggagcattttcttttccatagaatacatcacgtacatctaagtataatggttcaccagttgaacctggctctttagttctatcaagtacacatattctttcaacagtagatggcatagcatctaagaaatgtttcattgagaatggtctatataaatgaactttaactaaaccatatttttctcccttagcatttaagtaatctatagtttcttctattgtttctgttactgaacccatagctattaatacgtatttagcatcttctgctccatagtaatcaaataaactatgttttctacctgttaaattactcattttttccatgtatttttcaactatacctactatattttgatagtatttattagaagcttctctagtttggaaatatatatctgggttttgagcagtaccacgagcaactggatgatttggagataaagcattatctctaaatgcttgaactgcttcaaagtttaataaacttgcataatcttcattttctagtaattcaactttttggatttcatgtgaagttctgaatccatcaaagaaatgtataaatggtaatctaccttctattgcagctaaatgtgcaacaggtgctatatcagctacttcttgaactgaaccagaagctaataatacacatccagtttgtctagcagccataacgtcttggtgatccccaaatattgataacgcttgagatgccaaagcacgagcacttacatggaatactcctggtaataactctcctgcaactttatacatgttaggtatcattaataataaaccttgagatgctgtaaaagtagaagttaaagctcctccttgtaaagaaccgtggaatgttcctgatgcacctgcttctgactgcatttcaacaacattaactgtttgtccaaatatattttttcttccttgtgatgcccactcatcaactacttcagccatagttgaagatggtgtgattggatatatagctgctacatctgtaaacgcataggcaacatgagctgcagctgtatttccatcaagtgttttcataaacttagccataatatgtatcctccttgatagctacaattgtacttgtttataacaagtctatttttttatatttacatataatttacacaacaaaaatataaacacacatatagtcgcgcaaatactctatcttctaatataatactacagattagataaaattcctttgaaaattgtaaattaattacatatttaagtagattttttttaaaattaaatatgttaagtttttttcataattttgtatacaatatataataaattaagttagacttttcaaacttttttatctatttgtttacattagtataaaaagtaaaataattatctttattatatgtaaatttttatatatataattttaccatattacatcatatttttgtaagtttttattacattttttataatacccctttattttataaattaatctaatcgattaaatttatcctatagaaatttattacatttaaaaatatgctagcaaataaaatatctactagcataaagtctatttataatattaatcaactattaattctactaaatctccatttttaacgcctgctgcatttccctcttccatatcaacatgcatttctagattaaagctatcactagctcttactaatacattttcaaatactaatgctcttggtccagatgttttaacttttactatttgcttatcagttacaccaaatttagcagcatcttcattgctcatatgtatatgtctagaagcaactataactccttctttcatttcaacttctccagcaggtcctactaatttaacacctggagttccagctatatcaccagattcttttattggtgcttttactcctaatgggaaaccatctgctaaagatatttcaacttgagtatgagctctagctggtcctagtactctaactccctttaaagttccttttggtcctactaaatccactttttcttcacaggcatattgccctggttgagataatggtttaaatttagttaactcatgacccgccccaaataatacgtctatatcagcttgactcaaatgaacatgtttattagataatgctattggtaatttcattgaaattccctccttttaattatttaaattattgcaatacaattatacataatattacctacaaaatcaaattatattgaatcaatatatatctttaaatttttatatattatatctttaaattcttgattatctatataagatacatcatctgtattgtttaaatatatattgtgtaaaagtttagtatttatactcttaaagaaaaaatccataacaatctgtccacctttaaactgtgaatcatatgatttactcccccccactgcaatatacattcctatccgtttcttatttctatcaattgaaggtttatttaatacatatttacttgcatatatagcttgagttctatcaacaacagtctttaatttagctgatattgaatcaaaatgtacaggacttattactatagttccttttgaatcatcaaacattttatataatggcttcatatcatcattaaacttgcaataccctgttttttcacaaaatccacatgctgtgcaatattcaatatccatattgtagatattaaatattttacaacttaacccacactcttctagcatagcttttactttatttgctataaaactgcaatttttattaattcttggacttccatttattattataatctctgtacttttaagtccttttttatcgtttgaatccataatcaatctacctatcctttaacataactattaaaatatcatcatcataattatcttttgatgagaaattctttaaatccaattttagattttctactattaactgttgatttaatctaaaattttcttttagaaagttttctaatctgtttataccatactcttcttttgatgaattttttatctctaaaattccatcagtgtacatacataccattgcataatcttccattgaaagagtattattttcataagtagcatctttcattattccaataggtatgccctttttacaatttaaattattttctattgtgccatctttctttacaactacaggactatagtgacctgcattagacacagtaatcatattttctttagtatctataatacctatcaaacaagttgtaaatactcccatcttgtcaaattcatcatataacatcctatttaaatttgtcattatttctcttggtgtattgtattgattgcataatactttaaaagcaccttttatcattgcaacaacataatttgataccattccatgtcccattacatcagcaacaatataaactatatgttcgtcatccacttttgtagcataataaaaatctccacctactacccttgctggtttatggtaaaaataaagttctttctcatcattacaatccattttacctttatccataataagctgttgttgtttatttaatatgttcaactcattttcaagaactttgtgttttacttccttttcattatgttcatataattgcatcccaacagaaacttgtttggacaatatactaagaatatttaaatcatcactagtatagtttttactatttgcacaaactatacatcctatagtctcatttttatcctgaagtttgtaatatatataactttccaaatttatgcccttttttgagcatggttttaaattatttaggtatccccctaatgactctttctttaaaaacatatcaatcataggatataaatttgttttctttttttgctcaacattataacaactaactatagtatccttattatgatgactatttataattattaaagcttctttactattagtaatattacacgcttgtttacttaaattttccaaaaagccatcaatactcttattaaggtatagttttttagtagcttcatttatggcacttattgagcctcttagtttatcaattaaaatttgtacattattatttttattagttatttctattgataaacttaagagtgatgcaacagatgatataaaatctatatcttgttctgttatataatcatcctcttttaaaaaacaagtcataaatccaacaactacattatttattataaaaggaaaaactattctcccaatataaccttcagcttttgctaaatctcgttcaccttctgctctagaatcttcaaatacattttccacatatattatctttttttcatttacagcctcatgtatatactctggatatgtgtcaaaatcaatttttgcacctttaagactatttattggaaaaatttgaggtacatattctaaggtttgcgaacatactaagtaggcatatttagaatcatttttataaaatagatttacacatgcctttgtagggtgaacaacttctaacattttttctattatgtcatcttttatattaaaaaaatctgtagattccgtcaccatagcggatatctccactaaattcttcattttataactgccattagtcatactcaatttctccccctatatattaaactatttattagtattttaacatacattctttatagtaaaaacaaaaacaacgacaaaactagcaactaatatccagttaaatcctgtcaataatcctataagaagtaatgtaatcaatgcatttagacctgttctccctttttcatccataaaagttattttagagatgtcgatattatttttcacattatttatatgctcttttacttgttcttccatatttcttttatatagtatataaactacaccaattaaaaacactcctatacctagaatcatgtttaaattaaaagctatcataagcagtattgaaccaaaagccaactttaaaagcttaaaaaatacgctatctatctttagagttatatttctgatttctttacattcatctcttaaagaatatccacttgagtctaggttattaatctttgtttttacaatttcagaataaaaaagctttattatcccatttaacattttcatcactcctaaatattttacatatatttgtaagttttacaattataatattttttatacttggtaataataaaaaataacaaatattttatgatttagtatttactgtaaataaattattgaagctttattagttaagtatagatttttaataaatatttttataattagaaggaagtggttttgtgcaaatagaacaactcgatttagaaacgagaaataaaatatactgctatactaaaaaaattcttagaaaatatcaaaaaggcataacatctggaaaattaacagcagataaatttgcagataatatattgtctcaacattttatcagtagtatacttaatgaaaaaatagtcaatgagacaaattttaagatatcttatagaaactatatagaaactttaataaatattcaaaatgaaaatttatctaacttaagaaaaaaatctactaaaactgcaaaatgtttcaatatctctcaaataacccaattaaaaaacttactaagtaatactggttataatttattaattccatataaatacttaactgctagagatatagaaggaatcgttactcttattaatactgggtctattgaacttggaaatgagagaatctataattatatatcaaaagcataataatttaaacctattataaaaaggcaatttatttaataaaaaatatttttaatattaaataaattgcctttttaattttggactaaatactgctatccaagtgctttttctagtttagataaatgttgtattggataatattttagtagctctttaaattgttctactgataaaccttctgttgttgtatatattcttattttttcatctaagtcactattaataaatttgttttttaaatcctcaaaatttacactactcattttacatcactccttatgtaacatattcatttgtattattttatccaaatacataaaatttattacataaaaatatatctatttaataatttaataaaaaaaagctatctcaatttagaaattactttctatatttgagatagctctagctaaactaatagccaatagttataaataattatttataactatctgttgctttttccagccatttgttgttcagccatttcaactaattttttagtcatgtatccacctacataaccattttctcttgcagtaaggtttcctttatcaacttgttgataattactcataccaagttcattagctatttctaatttcatttggtttaaagcctcttttgctcctggtactactgttctgttgttgttattgttacttgccatgttgattaccttccttctgtttaatttattttgtgttgctgataatattatgtgattttaaacatttttaattcaggtaatttttagcaattaaaacctgccaaatatccagtagaaaaagctatttgcaaattgaatccacctgtatatgcatctatatctattacttctccagcaaaaaataaaccttctactaattttgattccattgtgcttgaatttatttcgtttacttttacaccaccagaagttattatagcttcttcaataggtctgtatctctttactgtaaactttaaattttttaataaatggactaagttttttctctgctctctagaaatttggtgaacaaccgtatttgcattaatttcacttaagtttattattataggtattagtttttttggaagtaaatcatctaatgctttttcaaattttttatttgtatacttctgaaaatctttttgaactcttttatccagtttttcctcatctaatgcaggttttaaatctaataatatagtgtaattttctttccttgtatctttcattctacaacttgcagacttgattataggtccatctaaaccaaatctagtaaattcaagttctccaaaatcactataaactttcttttgtttgctattaaacacccttatttcaacatttctcaatgataatttttctaaatcttttgtaaaactttcttgtacttctataccaattaaagatggttttgtatctataattgtgtgcccctgtgaaattgcaaatttatatccatcaccagtagaaccagtaagtggataacttaatccaccagttgctactacaactgaatcacacttaatttcttttttatcgtttaaaattactttctcaattttattatttttagatattattttttctacttttgaatttaataatatatttactttcttacttttaagttgtctttcaagagcatttacaatatcaaaggctttatcactctctggaaaaaccctttttcctctttctgttttagtctttactccaagattattaaacatacttattacatcatcatttgtaaaagtataaaaagcactataaagaaattttccatttgtaggtacattttctattaattcctctatttcacaagcgttagtaatattacatctaccttttcctgttattgcaagtttttttcctaatttatgatttttctcaattaatgttacatcatagcctttctcacatgcagttgatgcggctatcatccctgctggtccaccacctattattactaccttcttcaaataatcactcttttctacccttaatttttttaatttaaactattgactctataccttaaaatcaatttaattttaaaagtttaaataatgctggagctcctgctattccataaaaaacaactactgtattcttaataaaattcataaaaattatactcatagtagagtcacttatatttaaagtgactattaacattgaaataaacaacttaatgccaatatataacattcctattgttactatcccaaccaaaaacctacatattcttgaaaaaattatatttttactccccttatttttattgctaaaatttatttttttgttattattatctgtattaaatttaacaaatctatcctcaaccatatatccaaatacaaatcctactattataccaaatttttcaaaatattcagggctatttagaaatatagctactattataaatggtataagtaaaactacaagtaaaatataatttttattatcatcaatatagtcaaatatttttataaatataactgtaaaaaatattcctaacatccaacccactatcacatctattggccaatgaacagctaaatacagcctagacaatcctactcctaaaaccataactgcacctattaaatgaagatatctctttttaaatatagtcataatactaacccaaaatgttgttgcagtttgagtatgagcacttggaaaagaataaccaccagcagtagaaactctcaatgattcaagaccttttattcctattggtctgggagcttttacaaactctttgatgcctaaatttacaacaaaatttccaattatagcaaacagtattttctgtccacattttttatttatacaccagtatataattgttgtaattaatattaataacggtgcttctgtgcttattgtaaagacaagaaatataaagttcaaaattggatttcttaaattttggaaaaataataatatatttaactgaatatccatatagatgtctcctttactaaaattttatataattaactaaaaagcactaactcccttagaaattagtgcttttgattcacatttaaatctattctacatcctcaactatacctatataaggtaaatttctatacttttcagcatagtctattccataaccaacaataaatttgtcttctataacaaatccaacatagtctacaggtatattagcttttcttctctgaggtttgtcaagtagagtacatagttttaaagattttggatttctagtttttaaagctgcaactagattacttaatgttaaaccagaatctattatatcctctacaatcaacacattctttccttcaatatctacatctaaatcttttaatattttaactgttccagaagactctgttgagtttccataacttgtaacactcataaaatctatatttacatccaaatctatacatcttattaaatctgaaacaaatacactagctcctttaagtatacctaccactagtaaatcttcgcctttaaagtcttcttctatcttttttcctaattcataaactttttcttttatttgttcttctgtcaacatttttcctgtaactttgtacattttgtatcctcccgctttccttctattaacttatatattatagcataccaaaatatcaattaaaatctttttcatcatttttagacctaaattaacagcttatccatacttttttgctttttccattaaaaatttggaataacgattcctttgtattataatctatatgtacatatattaatcagttatttttatcgattatataattttatttttggaggtacttttatgagcacaaatcatggagctaatttatatagtttatctagtaagtatggcttttcaaaggaagaatttatggattttagctcaaatataaatccttttggtacatcaagtttagccaaacaatacattgtaaacaatatagatatggtatctatgtatcctgaccctgattacatagacttaaaaacttctatatccaattactgcaaatgttctatagataatatagtacttggcagtggagctacagaactaatttcatcatttatacatacaattaatcctaaacaggctcttttactctctccagcctattcagagtatgaaaaagagttatctaaaattaattgttctatagaaaaatactttgcaaaagaagaagataattttcatataaatttagaaaatcttataaaaactatcaatgctaaagattatgatttggtagtaatctgtaatcctagtaatccaactggatttgcatttactaaagtagaagtgagagaaattttaaaaaatacagactcatttttaatgattgatgagacttatgtagagtttactgatacagatacatactcttgtactcaattagttgatgattattctaatttattcgttataagaggtacatcaaaatttttttcaacgcctggaataaggcttggatatggtcttatatctaacactaatgtcaaaaatgaaataaataaaaatctagatttatggaatataaacataatagcttctaaaatgggggaaatcatgtttagtgatttagattttatatcaaatactatttccttaatgaacactgaaagagattacctgcttaaagagcttaagaatataaaaagcttagatatatacaatactaaaggtaatttcatattgtgtaaaatcaaaacaaaggaattaactgctaaatcgcttcgagaacaactgcttccacaaaaaataataataagagattgttgttcatttgaaggtctagatgagtatttctttagagtatgtatattaaaacctaatgaaaataaattattaatatcatctcttaaagcaatttttaaataaaaaaatccctttattttataatttttttataccataaaaaatgagctatctctatttgagataactcatttttgattattaaaaaactaagcactttgctcttctttgtttccttttttactcattccatcatttattttatctactactactgctattgcattatctcctgatacattacatgctgtaccaaaactgtcttgagttaagtataaagctatcattaaacttgcaagcccaccatctgatggtattccaaccattggtaggaaaggaagtgcactcattatagccccacctggtgctcctggtgctgcaaccattgctatacctaacattgcaatataagggaataatacacctattccatgtggcataccattcatcattaaaactgcagttgtaaatcctgttattgatatcatactacctgataaatgtattgttgcacaaagaggtacaacaaattctcttatttgcttacttactccatttttttctgcacaaccaacattaactggtatagttgctgctgaagattgagttcctatagctgttaaatatccaggtacttgattttttaacattcttactggattttttcctgaaaatacacctgctgctgtgaattgacatgccatatatacaaaatgtaaaggtattactactaagtatactttccagaatacccctaatattgtccatacttcccctgctatagttatatttgcaaaagttcctgctatgtataaaggtaataaaggtataatcactgttgacaacgttttcgttacgattccttgaaattcttggaagaaattaaataaagtctctccttttccatgatttcttaaagctgatattccaagtcccattacaaatgcaaatacgattgcagctgttacatctaccataggctctaatggaattgtgaatattggagctaacattcctgcctctgggtctccaatttgacttgcaacacttgcatcaataaaatttgggaagattaatgtagatactgcaaatgataataatcctgctattaaggtagaaccatatgctattcccgtagttatccccaataactttcctgcacctgttgctaaatcagctatacctgctgttacaaaacctataattataaatggtataacaaattttaggaatgctgagaataaggtactaactgttactaatatttgtactattatttctggtgcataacttccgattaaaataccgactatgataccgatgattagtttgggcactaaacctatttttttcttcataatatttaccctccataacttttttaaattaagcattcttgcacattgaatacttagttaaatattggatatccacttattatgataatagagttttacctctccgtcaacaatttaaccattttttgttaataaaaaaaagaataacatatataaattgttattcttcttcatcttttatagaaaattctacattttcaattatatttgaatgtttatctttttttataataactctatacttattaatttcttcattcactatacctatactccaaattaaaactatagcatcatctataaaaccaaatgcccctgcaatcatctctggaattatatcaaccccagatacaaagtaggatatagtaaaaattaatacagaaattacctttattttatcaactatattgattcttttatctgtcataaaatcaggtagtttaagtaaatcaaatacaaaaaccaaaccaaatttagcatttttaaatctgaccaaaattttttttaaaatatctaaaactatattaatgattatttttaaaaactccatatttatcacctcttataattataggttattctacattataaccgatataattaatttgatgaacatattagatataaattttatcaattagtttatatttaaattataataattcaattcctgcactactacaattttgaatcatatcctgtggccatactccaacttgtacttctcctatatgagctttttgtaagaaatacatacatattcttgactgaccaattcctccaccaattgtatacggaagttcgccatttaaaagcatcttatgatagtcaaactcttttctctcttcacatccagcaagtttcaattgtctatcaagagattcttcatcaactctaattcccattgaagataattctaatgctgaatctaaaacaggattgtaaaataatatatccccattcaattcccaatcatcataatcagggcttcttccatcatgtttttctcctgatattaatgtttttcctatttgagttataaatactgctttcttctcttttacaattttatcttctctttccttcggtgataattctggatacatatcttctaactcttgtgatgttataaaagttatttcttctggtaatatttcttttataccttcatacatactacatacaaaaatttcagtatctttaaatactccatacaatctttttacaacatcttttagagtcttttcatttctactacttttatctataaccaattcccaatcccattggtctacataaagagaatgtatattgtctaattcttcattttttcttattgcattcatatctgtatataaaccactaccaacttcaaacccatattttttaagggctaatcttttccattttgcaagtgattgaacaatttctgcatttttattcataaatggtatatcaaagcttacagccttttctccatttaaattatcatttgcacctgtttctggcaatacaaataacggagaagaaactcttataagatttaattcattacttagtctcatttcaaaaaaatcttttaatttttttatagctatttgtgtatcaattacgttcaaactacttttataatcctttggtattattgtgctcatatcattcactccctatatttatatatttttccattaaaaaaacccttcatccctatataaaagggacgaaaggttgcttttccgcggtaccaccctgattagtttgaaataaattcaaacccagctcacaatgtacagatattactcgatacaccccaatatgataacggtttggttccgactaagcctactcttttaaaatttcggttagcaactccaggatgttcttcattatagacttcatattggtctcacaccatcaccaactcgctttaattacattctataactactcttcctttcaaagtctttaagagtttaattcaataaaatttagctctcttatgttttctatttattcataatagtatgataagtgattagttaaaatttgtcaagtttattatttttttatttttaaacactttataaatttttacctatactttataaattttcaaatatagtctttaatctgtccatacattcttttaataaagactgtggacaagctacatttattctttcaaatcctattccttcttttccaaatatataaccttcatcaaataatacattagcttttttaaacattaaatcctcaagttctacttcatttaatccataagcagtaaaatctaaccatgctagatatgttccttctggataaacaagttttacttttggtaggttttcttttaagtattcatcaataaattgtatattattatctaagtaatcatttaattcattaagccagtcttcactttcattatatgctgctattgtagctacaatagcaaagggatttggtgaagttgcaactccaacagctgtaacctcttcttgatatttcttttttagttcatcattattcactattatattagacaactgcattcctgccagattaaatgttttacttggagctatacatgtaattattttatccttgtactctgggcataatgactgtaaaggagtatgtttaaatccttttctaactaaatcagaatgtatctcatcagctattatccataggtcatattttttacatatttctacaaccttctttaattcatcttctctccaaactcttccaacagggttgtgaggactacaaagtatcagtactttattgttgctacacttagctttttcttctaaatcatcataatccatcctataagtaccattctcatatattagaggattgtttacaatgtccctattattgctctttatcttagcttcaaatgggtaatacactggtttttggactattacaccttcattagaattagttaatattcttactaaaatagcaacagcaggtacaacaccaggactaaaaataatatcttttctatttatttcccagttaaatctccttttataccaatcacaaactgcattaaagtatttatcactatcatttgaactatatccaaatattttatgttcaacttttttacgtaatgcttctattattggttctgcacattcaaaatccatatcagcaatccaaaaaggcaaaccatctttttgtgcttttgttgaacaattagttctaaaatcccattttacacaatctgttcctactctatctattactctgtcaaaattatacttactcattttttccctcctaagaataaaatttttataattgttaagtccattactagatgcactttggtattattttacaattcttaatattataataatatcacttttttgtccaatagatttaaaatataattacttttccatcatattttttcaatattccaaaatcagtttcattatatcaaaataagattgctcatattaattattttctaattaacataagcaatctttttctataacttctataattataattttaaatgtagaattattagtttggatattatcccaatctcttttcaaccaatctacaccatatatctacaccatattctaaagctttcgtatcaaatgttacatttggattatgaaatcctggtgtagcatcagctcctaatccaatatatgtagttttacattttagtttttgtgtataataatggaaatcttctccaccagaatttttaaatatacctatagatgcatcagctcccaatacatcttttatagtttcttcagccaagtttacaagttcttcatcaaattctgctgctggtactccatctttggaaattagtacagcttctgcatttatagaacttacagcagtttttacagcatgtattgctttttcttttaattcttctattatatcattactttctgcccttatatctaaagccataaatgcttcatctggtatattattataagtttctcccttaactgatatatttgttacttttatagaatttggtatagctggatttactcttattgcatttattgcattcactgctaaacagacagcatctactgcatttactcctaaatgtggtttagaaccatgacaagtgatacctttaatcgtaaattgcattatacagctagcacaatggtacattgcaggtatcgcctttcccaacctacaatcttgtccaggtcttaaatgcatccctaccatttcttctacatcatccaacaaaccagaatcaattactcttaatgctccatataatttttcttcacctggttgaaaaagtatttttaacttacctctttttactaaatttctctcttttattaactttgcagctgttaaaagcatagaagtatgaccatcatgaccacaagcatgtatcattttcttttctccatctatgataaattccaatgcatccatatctgctcttatagcaaatactggtccttcttttttagaatctatagttactataataccagttcctgcaactcctttattaatattttcaaaccccattttttcaagctcttttaaaacaaactctgatgtcttatattcttcaaatcctttttctggtatagtgtgtagataatcatacactttatgtacatactcaatataatctttgttagttcccataatctagctcctccttaaaatttaaactttccatttatattaaatttttattataattacctatactacgaaataattcattataagcattgcaatacaaccatttaaagttgctataacaaacatatgtggataatatttagtttttaactcagctgttcccaaaagtctccccataaattgtatctgcgctcctgaaagcaataacattggcaatagaattgcaacatgtgcttgacttatttgacctgctgtaaataaacctgcgattactccagatgctcctcccattgatataaatattgtcattatagctgttgctgcaacacctggaagtccaaagatactcattacaggtgtaaatattgtccctattacatccaaaagacctgttaaattgaacacagaaattatagcaaaaccgaagatgacatttggagccattgaatttgtacttatttggaatccatttctagctcctccaataaacgcatctatcacatttccttttttaacttttacttctttttttgctacctcactcatgttaagcttcccccttgtcaaatttatttaaatataatctaagtaagttcgccccaacaaacttcataattaatattaaagcaagtggtataaatattggtacatctcctataaatggaaatagtgctgctccagaagcaaagaaattcgtaattgcagacgcacctgaaaattgaaatgcacaaaatacagctttttgtttttcatctatatacccatcatctttaagttctttagtcatagatgcagctgcatctgtagactgtaaactagctatcaaagttagtcctgcaaatccaggtaaccctaataatggctttaatagtggactaagaagcttttgagctgccttcattccatctaagtggtctataactctaactactccaagtgcaaacataactgatggtattaatgtcaatgcatatagccatccatctcgagggccagtacctccatcacctctaaagtttgaagctaatgtacctacaccatcattaattgttcccaatgttccaaaagaacctaatacattgttaaaatccaatacttttaatggtcctggtgcatctttaaatattcctgaaaaaaataatgctcccaatattaatgctacatacccataccattttacctcaactttttctgttgttgattctaatttactcatataaattctccctcctgtttaaatgaattttattagtatacttgtttaataagcaaaacttatgccaataccttaatgataaagcctttgtatttatttttttattgtaaatttattccagcgattaaatagcttataattacttacttttcaagtttaaaaatataatatttttttattaactatttaaaatatacattacaatataaaaagctattttccttatcttgcaaaaataattttaaaataggtttttataggataaaatcctaaaaaaacctattatttaatcaaatatataaatttatactactatttgttgtataatataacttaccttatactttaaatactttaaaaataaatactattttgttaggagaaataaaatggataaaaagaagttaatccttataacatatgataaattaaatagtgaccactacaaagaagaattaacaaacttttttggagacgaaataatcatagaaacacaaaatatacttgatggaataaaagaaaatttagagggagaggtagtgctttctctatcacctttaactagtaattttttaataaaacattttaaggaagatattgaaattattcatggaacgaaagcactttcaaaacttggatatgaaaaaatgatgaaactacctccaggtacaaaatcgttacttatgacaaccaataaaacttcagcatttgagatggctacttatctatataaaattggtataaatcatatagattttgtaccgacatatccagattgtgatgaaatatatgatttagatacagctataacaccaggtcagattagatttataccaaaatacataaaaaatattgttgatttaggttggagaaaaatctcattagatacatatatgtcattattagtagtattaaaactaaaaaatgagaaatttatagaaaaactatacaaattgtccaaggagacactaagtcatgatttcttaaatacgtcattagataatatatctaaattaaaaactatactttacatgaccattgatgaaataggtgatggtctaatatttttcaacacctttaacaaggttacttttgtaaataagtctttacttaatatgttggaactagatgaaaaacttataaaatcaccttccttaatggaatatatgccaaagagtttcttagataaaattacaaagaacttaaatatcgataatatgattatatacatagacgaaatagataaaaaattcatactttctaaaaaaccattttatctttataaaaatatagagggttgcttaattacattaaaagatgtaaacaatatagaaatattagaacaaaaaataagaagtgattctgtcaaaagaggttatgtagctaaatataaatttaataatattattggaaatagttctattataaaagattgtattaaaagggcaaaaaaaatggctcttacagataatcctatattaataacaggtgaaacaggaacaggtaaagaagcctttactcagtcaatacacaatcattcaaatagaaaaaataaaccttttgtagcaataaattgtgcttcattaccaagtgaattacttgaaagtgaactatttggatatgaagatggttcttttactggagcaaaaaaaggtggaaaaaaaggattattcgaattagctcatactggcactatatttttagatgagataggagatatgccacatgatttacaggttaaacttttaagagtcttacaagaaaaagaaattagaaaaattggtggtacaagtattattccaattgatgtgagaatattagctgccacaaataaagatttagaaaaattaattatagaaaataaatttaggatggatttattttataggataagtatgttcactttagatttacctcctcttagaaagagattagaagatatacctcttcttttagaatcatttttaaaagaacttccctataaaaacataaaactcgataagagtcttttagaagctttaaattcatacacttggatggggaatattagagaactgagaaattgtgttgaatatatggcttacatgggttccaattatcttacaataaatgatttacctcaaaacatatcttcaaaattaaataataatcatatgtcaagtaatatgtctatattcaatgatttaaaccaatatgacaaaaacatatgcatttctatcctaaaatcattgcacatgaaaccaatggggaggacaaagttaatgaaatttatggaatataatgtcacagaatacgaagtaagaaatatgctagaatatttgacacgcaatggatacttaatttctagtaaaggaagaaaaggctcatcaataactgagaaaggcataaaaataatagaaaataatataatttaaacctatagtaattcatctttactttatcaaaatttatatataattataattttttatttttctataaattttttataaaataataaaacttatttatattaaaaaagaagctatctcaacatagggataagcttctttttaattgttaaaaagataaaaatatatttgatttaacagaaaaatagtgcctcataaactaaaaagttcattttgagacacttccttaatattaataaattaattggcttaaaattactgattgataattataaagtacctctgttaaaggagtaaattctgaaccgattccaaatcttaattctgtaaacgcctctaaataatctgggtcacatacatcttcttgtgttaaatcttgtttcaccatttcagtagcaagataaattgctactgatggtagaaaagcatccattggcataggatatccaccaagtctatttgacataccaaaagccttagccttttcacttatcatgtcgtttattttatcataattttgagcatctttttcagatatttttagacccataacactaggatacgtttgtattggtgatggattgctttgctctgcaactatatactttaattctaaagccttagtcaatataacttcatccatatactcatttacaccaaatacatttatatcttttccatattttttaacttgtttttcaatatcttcatttaaaaactgcttaactttgtttttgtcttcttcagtatttatatttggagtattaacttgtacaaatggcaatcctatatttttacaagtctctttaatcatttctaatcttttggctatattaacatctttcaaatcatctgtagaggcataatgaataaaagcttttgctcccatttcttttgaacgttcagctaatacttttcctctttcctctgcactaacccctagattcacatcaacaaattggcttaattggtttttatcatctcccataggggcagaaatagttattatttctggacgcttttcctttaccttttgtaaagcaggtaaaagccctgcttggtcagttgaaactacaatagcctgaacttctttatcgtcagccaactttactatcttattaatagcactatctatattagaagtaaaattctctggcaatacaacatgttttatagtttgtttaactttagtttgaccatctttgtctttatcaattttattctcttcctcatattcttttgtcatctcttccaccatattgtattgtactttattttcagataatggttgagttaccactgcaactttaaaatcatctataattttctctttatctttcttgcctacaagtaaactacaacctgtaagtccaataattaaacatatggatagcataaatgctgttatttttctaagcattaattaaaacctcctaaatttgtactttcttatcactattactaattttatcatacttcaaagaaaaattatattataaaaaattatatacatgctattccaatccaatctaaaaagtactatgggtagattaggtttagattaaacctacccatagtactaaaaattaatatattataaaattaaattaattacaaattattatgctacttgtttgttgctttttataaagttaccaactattccacccaatatagctggtattacccagttaaagcccaaacctgcgagtggcaagctttgtataaatggaacagctcctgtcattccatttatagctgataatagactaatcactaatgtaacatatgctgcacctttaaaagcattatcattctttatatgtttaccagccaactccataacaactattgctaataaaacaggatatatagtttgtaggattggaactgatatagctattatagaatcaacacctaaatttgatataagcatactagctacacatatacctataaccagttgtttataactcgccttacttattccttcaaaataagttgatattgatgctgttaaacctgtagaagtagtcagacaggcaagtgccacaattacacctaaaattacctttcctacttgaccatataacaatatactagttatttcaactaataaagatgcttgaggtatactagtatcatataaagttgaaactgttgcacctaaataagtaagaccaccatatactactgctagaaatacacaggctacaaaaccagctttaatagtcattcctatttggtctttatctgatgtatatcctttagctattatagacatcaacattatagttgccatagatgctgcacctagagcgtccattgtttgataaccttgtgatataccttcaccaaatagatttttatctatcatatgctcaggactcataggtcctgctggagaaattataccctttactattaaaacaaataatactaataataacgctggagttaaatacttacctattatgtctataaccttagaagacctaatagtaaatgctaaagttaacccaaagaagattattgaaaatatagctttagctactggtccatggtctccaaatataggcataatacccatttcatatgttgttgcacaagttcttggtattacaagaagtgctaaacatgctagagcagctacactcattactcttgctaaccctttaccagctctcctaagtacatcatccatgcttcccttgcatcttgctgttgctataataacaagcattgctataccagcatctgcaacaacaaatccaataagaggaattaaccagtctttgccggattccatccctaaaaatggaggaaacataagatttcctgcaccaaagaacatagaaaataaagcaaaaccaactataaaaatatctctcatctgcttactcacactaaattaccccctttgaaaatattttgaatattaagataatcttactttattttcagaaaaatgtcaatctggtaaaaattcacacattgttaacgttttcccaatttattttatgaatatttttttcattttatgataattcccatcaatttcgttaaatcaattgcttgtgacacatcaaaaattgctcctctaatctcatctataccaatctcaattccctcaatattattagtggtaaaatctatgccagaaagtttagttccattaaagtttgctttttttaagtttgtatactcaaatactagattgtcaccttttacttcttgaaatacagaattttcaaaatttgaatctaagatagaaactatcttaaatttagagaatgaaaagttagaatacttacctaaaacatccttgaacaaaacgtttttaagtatacaatcatcaaatctaactcctatcaatttactatttttaaattcaactctgtatatacttcctccatcaaaaaatgaatttgataaattgcagttttcaaataccacatcaagtaaatcaatcttttttaaattgcaattttcaaaggatacatttctaaatatacaagattcaaagctaactcttacagaatctaaatcacttataacttcattttctataattttattaaatattttttcatcattaaatatatcttcaagtatatcttcaagattttcaataatttctaattctcctgtaaatttaggtttttgcactttaataattttagtcattttcccctccactataaattatattatttttgatattattttttttaatatattaacttaatatacatatttgatatattaaaaagtttttacgaaatatccgtgtattcagtacttttataattatatcacaaactcatttataatagacttctatataatagtataaaacaagttagaataattgacattatacttatacatattcaattattgaaaacagtaattcttgccaataaataaccttaattttttataaaatcgacaaaaaaacgaataattttattatatttattgtaaataatacaatattacgatataatacaacagaaaaacaaatagaaaatgttcatataatattagtaatacggtctaatagtttctacaaactcaccttaaatgggttttctatgaatagaatatcaactttgaatatatgttctattctatctatatgaatatatatttttttgtttatatcttaaagttttttggaggtaaaaatggtaccaaacactaacaatgtacaaccagatggaaataattcatcattaagctttttagacaaaatgtttaaatttagcgaacgtggctctagccttaaaacagaagtaataggtggagttactacattcttaacaatggcatacatagttttcgtaaatccagcaatattatctgaagctggaatggataaagccgcccttataacagttaccatactagctacagccattggtacacttatatttgcgattttaggaaatgcaccatttgctctagctcctggtatgggattaaatgcatttttcacatactctttggttataggtgcaggaatcccatggcaaacaggtcttggggtagtttttctatctggatgtgtcttctttacactcgcagtaacaggtcttcgaaagacaattgcagacgcaattcctagagaattggcagtagcatcttcagcaggtataggtcttttccttgcttttgttggtttaaaaaatatgggtgttataatagctaatccagatactatagtttcacttgcagattttacaccaacagttttaatagctctttttgctcttatcttaatggcaatactagaatataaaaaagttaaaggtggaatattgataagtatagtagttgcaacaataatatctgttatatttggatttgtggagttgccaacagcaataatctcaacacctcctagtatagcaccagttgcttttaaattagatattgtaggtgcattgaaattctcattaattggacctatattctctttcatgtttatagacatgtttgattcattagcatttcttattacttgttgtaaacaaatgggtcttgaagatgagaatggtgaaataaaagatttaggaagaatgttatatgcagatgtttcttctactttaataggctcattcttaggaactagtactgttacaacatttggagaatctgcttctggtatcgcagcaggtgcaagaacaggacttgcttcaatagtaacagcagcattattcttagctacacttatatttacaccattgcttggtatagttcctacttacgctgcagctcctgcacttgtaatggttggtgtattcatgtttgaaagcataaaacagattgattttgctgatagcaaaatagctgtacctgcttttgttacagttttattgatgcctttaacttatagtataagtattggtttatgctttggatttatttcatatataataatgcatgtggtagctaaagaaactgataaaatcagtattacactttggattataggtttacttgcagttgtaaacttagttctaagttaatattttaaatagttctaggtcaatattttaaatttataaatagcaaaatcaatttatgtataaattgattttgctattaactttgtatagaaaatttattatcataatacatagatataaaaatatatagaaaagaggttgtacttatgtcacaattacttataaaaaatgcatatctaattactatgaatgcagatagagaggtatatgaaactggaagtatacttattgaaaataatattataaaaaatgttggtaagtttgatattaatattgtagataaagatgctgagatatatgatgctaaaggaaaaatactaatgccagggttagtcaatacacacgttcacttatcccaacaattaggacgtggtcttgcagatgatgttgtacttttaacttggcttagagagagaatctggccatacgaaagtagcttcaactatgaagattcattgatttcatctactgcatgttgtgttgaattgataaaatctggggtaactacatttttagaatctggtggtcaatatgtagatgctatggttgaagctgttgataaaactggacttagagcctgtttagctaaatcagttatggatacaggagatggtcttcctgaagcatggcaaaaaactactgatgaggaaatcaacactcaattagacttattccataagtttaataacacatctaatgagaggattaaaatatggtttgcattaagaactatttttaatacaactgaagaattgcttattaggactaaagagttagctgataaatacaatacaggtatacatatgcatattgctgaaatagctgatgaaatttcatttgtaaagcaaaacaacggagttggaacagttgaatatcttgataaactaggtgtattaggaccaaatcttttagctgctcacacagtttggcttactcataaagaaattgatttatttagattacatgatgtaaaagtttctcataatccaggtgcagctatgaaagtagttctaggatttgcctcaattcctgaaatgttagaaaaaggaatacctgtttcaattggtactgatggagctccttcaaataatagaatggaccttatgagggatatgtatcttacatcactaatacataaaggtagaactttaaacccaactgtcgtaccagctgaagaagtcttagaaatggctactataaatggagcaaaatgtgctttactagaaaaagaaattggtagtcttgaagtaggaaaaaaagctgatatgattattctaaatccagatacaattcattgtttaccaatgcataatccaattggaaatatagtttattctatgactagtgaaaatgtagattctactatttgtgatggtaaatggttgatgaaggaaagaaaagtattagttgtagatgaatctgaattattaaataaagttaaaaaacaagcttctaaaataaaagataaagcagaagttaaaattccatctaaatttaaaatcataaaataacataaatttcaattgttttgtaaatatgaatatataaatatatttatacacatcatatatacaaaacaattgtttttttattttatattcattaacattgctcataaaatacaccataattccagaaaaaataaccaatcagttaggattacatcatctaagcaatatataaacgtcttagtttataagttttattctactcttatctaaaaccatctttaaagagttttcaactgtttcaattacatctttataactcaagtacacatttgcgtagatacaatcttcatataaattatattcagttactctacaatacagcagttttcctccatctaataaattgctcaaaatatagttttcttttcttgggacatagcctattacatatccagtttcaccaactattttaatagctttttcatcatatagattatctttctctctagttaaatagtatatcttactcttctccaattctttttcaagatattctctatttctaaaccttgaaccagcaacagctattgaagtcaaatagatatccttaccatgttcatctacttttattttttcaatatttacaaattctttttttaaattattactttcatataatactcttcttaattcatccttcaatataacatttttttctttttcatacgcttctttaacaatttttaattcttcaagagatagtttctctctgtatctttttaagatatttatggattcttttcttacttcatttatatttccaaatattccttttaaagatatattctttccttcaggatatagtgatttacttcctttaagcacaataaaaaataacatatcatcataatattcttgagtcaatttatctttttctatatctttcatttttccaattaaatcatctattttaaacgtctcttcaaaaaaatttaataattttaatctagaacttgtcgttccctttttagatatatgccaatatacctcaaaatctctaatatctctattcagatatggcaacaagtcatcaaaagataagtttacatcataaatttctgacatttttataatatcttctgtttttccactagcatctcttaatgcttcaaaatatatatttttccatttttcactgagcaagatatcatttatttctttttcaaattcaatcttattgtactctatattttcatcttttaagacgtttatagctattaggaaaattgaatataaactttcaaagttagtcccataatttactacagtaggtaaaaatcgattcactaattctaatttattacctatatatttaaattctacacttagcaagtaattgcatataagacgtgctaaattatttatcttttctttatctaaatctcgtttttcaagatattcattcaaatctacaattgaaataatatagttcatcaataatcgttcgtactttgtatccttataaccatcttcaattagataggaatttattttagaatctaaattttccatattaacaatagcaaatacttttattgaacctgtagcctttttagataaattaaataaatatgtattgtaaaattcaagttttttaatagtattactcagataaaatacgtattctccagatttagaaaatgtatctacaacttctcttaagttttctacatttagatatttctcacttaaaactaaccctagttttacatactcaacttttttactcttatatattaattctttagttaatttatataaccatttctcatcaataatcatttcttttaccaaagtatttatctttttcataaaaatttcgaaataacaaattaaagacttagaattactatcctccaataaataaatttcattagattcacttttatacatatttaaaatttcatctactagattatttgcaagttctacttgttctcttaacggtatactttcatatatacataggtaattcatttcaaatgattctttgtatccatcataaccattaaattcctgcaatcgcttaaaaacattctccaccaaattatcctcctttacatgatgtaatttatattgattatactacttatttcgtcaagtttacatttatacgcaaaaaaatattactagaaattgaaattctagtaatatccttattattaattatgtaaataccctatcttataactgtaaataatatccttattaattttaattacttttaataaaaatctatcctagatttagacttctctatgcatatattatactaatattagacatcataatcatacactttttctttttcatatctcatgtttacaaacaatgcaagtaaaattccaacaaatgttattgccacattaaacaatacaacatattttggtccattaactccccctgattttgtaataatacctgctatatttaaaataacatagtttgctatactagatgcaatcataactatagatgttatttttcctttattagttggaaacatttcatttgcagttgacgttgttaactgaagaacacctcctgctgctgaataacctattacaaatccccctaacatacaaatagttggagtttgaacaaaatatacaattaatagcataagtaaagctattataggatatataactaatattcttattggtttaatatattttttaataagtaaagaagttattaatactgcacatattactcccattgagtaaaaggattgaatttttgtagggtcagccatcccatacaatttacccaattcctgattacaatttaaccataatacaaatgtagatgtacatgtaaatccaatacaaacaagagctatacttgttggtgtaaatttcatcttctctgatttaactgttttgcctttgttatcaataacattattagctggtggaaatggtaacacagctatcaaaatggcatctactacaataagaatcgctgttactataaaaataactttaaatgatattgaatttgctgcaacaaatccaattataaaaggaagcaaaaattgtgctaaagctattgtaaatttagtaaacatatttgctattgttcctaaactagcaaatatctccatacaagaaggagttacacaggtatctaagaatgaatttgctgcccctccaattattgcaaatacatatgctatataaaaatttggtgaaaatacaattccaacaaagaaaattgcatgtagaaagtttcctataagaccacttacttttcttccatacttatctgaaataggtcctgcaaatggataagatataagtctccctaatcctagtgcagcaataacagctaaaacaatacttacatccaatgttccatctgatagtgttttagccccccacattgatgaaaattctggtttgtattgtcctaaaattgaaattccaataccaagtaaaaaatatgaaaaatacaacgctatggcagtaggataatattttttattgttcataatttttctcccattcttgttaatttattaacatttttgtgtacaataaactcatcctcataatggatttaaagtatagtcagttaaagcttcaaatttaactggactatgatgcaaaacccactatgacaatttgtaatttattattaaaaatattgaaatacgtatgttttttcattgtttaagatatcactcttatctatttaaagcataattcattaacttcttctacaggcatttctaatccagtatatagattaaaagcttctgctccttggtataataacattcctaatccaccaatagccttacatccattagcttcagcatcttcaatcatttttgttttcttaggattataaacgacatctgttactactaagtcttttcttaaaacactagtatcttttatatttgtttcattgtcataaggcttcataccaataagagttgcatttgtcaatatatcacttgattctatctcctcataaagtttgtttgtatcttctaaatcatatagattaacaacacattctggtacatctttttttatattctcaactgtctgctctgctcttttataaaaatcatccttagcattaaagatagatatttctcttgctccatctaaagcacattgtacttgtatagcagttgctgcaccaccagcacccataattgtaatctttttacctttaacttctatcccattttcttttaaattacgaacatagcctactccatctgttatatgaccaactaactttccattgtcatttacaattgtattacatgctccaattatacgagctgctggagaaagttcatccatatattctgtaacagcagatttacatggcatagtaacattggctccttttatattaaaagtttttattgctaaaagtgcctcttttaccttatctactgtgatatcaaaggctaaatatctataatctaaatctaatttcttaaaactataattatacatcactggtgatttagagtgaccaactggtgtacctattaatgcaaataatcctgttctacctgaaatttccataactataatttcctcccaatattatcattttctttgcaaataacctattcagttatttacaaagaaaaatttatttattatttatatatttaatgctacttcaaaagcttcttttgttgcatctaatgccctacgagcttttactgcatcaccaacaatataagtttcttttacaacttcttttataacttcacttaatgggtcgtaattacgagaacccatagcaagtactactgaatcaaaaccttttaaatcatgctctgtgccatctgtaagtaaatagtcgacaccatcatcataaaatttagaaacttttgcaccagtaatggtatgtatattataattttcaaaatcattcataaggaatttacggtgttctgaaattacatctgcaccaacttcttctctaagctcaataacagtaacctcatgttcttgttctccaaggaaggctgccacttcacatccaaccattccacctccaacaacaagtacttttttcccacaagattttttaccatcaagaaggtctacagcatgaattaatcctgaatcattgattcctggtataggaagtacaagtggagttgctccagtagctataataactacatcaggtgatttctcctttataagttctactgtagcttctgtattagtacatatttttacaccatattgattacattttgaaatataacttctaactaagttagtaatatctcctttccctggaggatatgcagctaaacgcatttgcccaccaagaacttcagatttttcaactaaagttacattatgtcctcttttagcacatacccatgctgcaagcatacctccaacacctccaccaacaacaagaacttctttgctaatttcagctggcttaagctctgcttcatgtcctaatataggatttgcaagacaggctataggttttccttggaacatatttggtacacatccttgtaagcatgcaatacatggtatcatttcgtctagttttccatttttagctttattaggcatttctgggtcagccaagctttgtctaccgaatgctactaaatcacatcttccttgtctgaccattaactcagcaaactgtggctctgtataacgtccaactgttattactggtatactaacagctttttttatttcagtaactaattctgcactgaatccagcatgtaaagtcgtaggagcccacatatattcatcatgtatatgtatactacgtgaaacatgaagtccatctattccacaaccttctagatatgctgctattactgaactatcatgtatatcaattcctcctggaacatcatcagtgctgtttatacgacataatattgctagagaatttcctacttttttacgtatattttcaatgataagacgaggtaatctcattctattttcaaaacatccaccaaactcatctacacgcttatttgttctttgtgatataaaactactaaccagatatccatgagcgcagtgaacttcaacagcatctgcaccagctttttgtgcacgtaatgcagcatctccataagattctataagttcatatatttcttctgttgttattgctagtggtgtattacgaccatttgatgcaggtattgcagaagcagcttttaatggatgtcctgctactttttcatttccttcagaaccagcatgttgtaattgtatagataccttcgaacctgcatcatgacaagcatctattacatttttaaaactatctattgtgctatcatcatataaacaaggcttacgaggacctccttttgcttttttgtctacaacactagattctatagttattaatccaaaaccacctaaagcacgctcaagataataagccttagaagtttcacttaaagtaccgtctgtgtttgcaaaattgtttcccatagggggaactacaaaacgatttggaactgtcattgaaccaattcttataggtgtaaacatagaactaatcttcataaggttttccttcctttcaagttttatatttaaaagttttatattataatactctgtatatttttatattatataagtttattttggagatacttcagaccatgctttatccaaaacttttttagttgcattaaatacagtttcagcagcagtggataaccctttagatattagagaatcagatattacttctgcccctatgactcttggtgatatattgtgttcttttattattttcacaaattcctctgtgtttccatatccttcacctggagccaaacggtcatgtagtgattcatccctaagtttttcataaggagtttctaaaacatcacacacttgaattgatactatcttatctgctggaacaggtgcaaggtcctctgctgtctgctttgctctagcccagtgccaagtatctaatataagcattgcattttcacgattacatcctttcacaacacgccatgcagtagccaaatctggtacaccactatatggcataaactcaagacctataataagttcacctgctctgtcacataattctcccaatgcagttataatttgttcttctggtatcatctctaataatccacaatttatatgtttaacattaaataagtgagccatatgataaacattttgctctttttctctttgagcttcagttctatcttcttctgttccccattgagttatatattctacttctgtaactttcatatcatattcattaagaattgcaatcatttcttcatctgtaacacctgcattttttgcatcaatataattttcagcacgcaatccaataccatcaaatccagcttcttttgcaatacgaactctatcacggaatgaaacttctgttcccaatgtataagaactaattgtaattggaatattaagatttttttgattattcatagcttaaatttgccccctttattttctttataattaatagtatctttgattttatatttttatttatcctactagtagtattattttaccttaaaaataaaagtattttttgatttctatttatctagattttataaatttattgtatcacgagactttactaataacaaattgataatttcctattaattcatagattttgtttatagattttatttataagataattcttgtatttttctattaggttgtataaatatatttatcttataattcagacaaaaaacgataaatttttttaaaagcttttattcttactctataatcatatataataaaaatgtaaaaatatcttaaaggttaacttctacaaatatataaataaaaatacctatgaaaggatgaacaaaaattgaatttatatcacttacgctattttgttacattggcacatttagaacactatacaaaagcggcagaaaatttatctataacacaaccaagcttaagtcatgctatttctttactagaaaatgaacttggggtggctctatttgaaaaagaaggtagaaatatagtccttactaagtatggaaaaatatttttaaaagatgtggaaaaatcattagaaattttagattcaagtgtaaaatcattaaaaataactggtactggtgaaggacaaatagacttagcttttcttagaacacttggtactgattttatcccagacatagtgcataaatttttaaaatctaatcctgctaaatcaatagattttaaatttcatactggtgtaactactgacattattcaaggtcttaaagaaagaaaatatgatattgcattttgttcgaaacttgaaaaagaaaagggaattgaatttatacctgttgccaaacaagatttagtactaattgtaccatatagtcatccactagctgcaaaggatactatagatttaaaagaaaccataccttatcctcaaatagtatttaatcagagaagtggtcttagatatataattgatgatatgtttaaaaaaataaatcaacagcctaatatagtctatgaagtagaggaagaccaagtaattgctggattagttgcaaaaaatttcggaattgctgtagtcccaaatatgaatatgcttagctttacaaaagtaaaagtaattcagattattcacccaagttgggaaagaaacttttacttagcatttataaaagatagatatttgcctcctgcaattaaaaactttaaaaactttgtcattaaaaacgctcaattataatttattaataaaggggttatttttaaatatcctcttttattctttttataaaataaaaaaatctatacttttaaaagtatagattcctaactgacagtcggcatccgagtctcagtaattatcgttatacaacagcaactggattcagttcctgaataactaggttatttacattatatcagatttttttaaatttgtcaattgtatctaacgcattttttcaagccatggtccaacaggctctacaataggaacttctttaaatccccaatttcttatatcattcacactcgttggagtatatattttgtttctgacagatttgaatattttgtttttttctccatattgcatacactttggattagcttctattaaccctcttcttgctctgctaagaggattacataaaatatctgctatttctaaaccttctctatagtcagcatcttcttttttggcaattataaaacccttaaccttatctcttaattcttcatctatatctaagtatattgttccattattaaatacatcaaaaaacgccttttgtacttttaagtttgagacatcatcccttgactctataactattcgtgcagattctacagtttcattatttacaaatgaataaaaattctgaagaacatgtataaaagccacaacatacggttcctttgaaggtgcataatatttctttaatctagctttatctactgttactgatattatagtacactctaatctagatagaaataaaggcaactcatcatagaataacttaatctgtgaatcatcaaacttctcaaatgctcttgattttcttgatatatctgtcaaatgtattcctatgttactggttccaaaacaatactctttaaatgcatccatttctttcctcaaagaacatacataatcgccttgacttactgcatatttatattcaaaaattactcctgtcaatgtaaatgggtcttcatgatttatatcagctcttccactttcatcaataaacattatatattttttctttataatcttactcaccctcttaacatatgatgatagcatctatattcattttatatgagttttaaaaatattccaagatttttatataacttaaacttaattttatactaaaaaattgagatgtaaaacaatcaagcttttattgattgaatttcacatctcaattataattatttttcaatatatatttttactattttgcaagaatatccattaatttatccattactatataagatactccgcctcctatttgataaggagtttcaacttttttatttgcaaatactctttgttgctctaatgataatcctgaattatccattaaaactattggtgaatgtaattttacagctaatggtccagctgataaagcatctactaaagcatctgatttactaactaatacagcctgtaaatcagtatctccatagaatttttctattactttggcattagtatctactctactatctccatatattctatttcctgaaatatcttcagtagttatatcattcatttttgctattactgaatcgttaattgcacttggtccacctataaagtatgcattttctaattttctttctgttagccatttataagattcttctgtaattccatctttattgactaatattataggttgtttttcttccccagctttagaagctacagataaagcatctgcttccccatttccagaaaccatatatgcagtttttatttcttctcgatttccaagttcttcagctattcttgtagcagtttgatatctatcttgacctgctattctctttgtctctgtgttgaaagtagtttttatttcttgctctaatttagaacttattgcattttctccacctatcaagattactgttttaggtgctaataacttcatttcttcaacagtttcagttggtaaattagctgtattagtaagtagtattgttgagtcatagctacttgctaaaggagttgctgttataccatcagctattgcattaccatttactaatattacagtatctgaactatcagcattccagtttccaactgaacttatctttttagctgtatcaaatctatttgcacctataattgtatcccatgtaggatttatagttccatcttcattaaaagtataatctttcccatctattttttgagaaccagttagcatctttccatctttgtctaaatagtaagacttaccatctatttgttgccatcctgtctgcattattcctgttttgtcaaagtaatacttattaccatctatttcttgccatcctgttactgataaaccatcagatcctagatagtatttctttccattcttttcttgccatcctgtttgcattactccatctgagttaaagtaataagtttttccgtctattactttccatccagatactcttgctccatcagttcctaaataatattttttgttattaattgctttccatcctgtttgcattactcctgaagcatcaaagtaatacatttttccatttacttttagccaactattcttttggtatgttccatcagattttacataatacttcttaccattttctgttttccatcctgtttgatttagatttatcttatattttgccgctatctttacatagctgtcattactataatctataattacatctgaacctacaggaacttggtcaaataaccatctaacatctttattgtgcattcttatacatccaccagaaatatgctttcctatagaactctcattattatttccatgtattccatatgtatctccataagttccttttaatgctaatcccatccatctatctcctaatggatttcttggacttcctccaggtatattacctttataatatggtctattttttatcttgttaactacttttgttttccctgttggtgtttctgacccctttttacctgttgcaactctaaattcttttacaagtttattatttacaaaatatcctagagtattctttcttgaatttactataatcacatgtttactggctgcgcttgattctggtacgccacatgcaaatactaaaactaaagtcagtgctagtactaaatacttttttagactttttttcactataacttccccctcttttagaaacattactacatgtgtctaattataacataaaattaccaataccttatatttacaaatttgttacatttatacatataagtatgtattctactcttcatacccattaggattcatactttgccatctccatgaatcttcacacatctcttcaagttcatacttagctttccatccaagctctttttctgcctttgaagaatctgcataacacatggctacatctccagcccttcttcctacaatcttatatggtatttcttttccacttgctttagaaaatgcttttactaaatcaagaacactataaccctttccagttcctaaattataaacaacaagtcctggattttcttctaatttttgtaatgcttttacatgaccagcagctaaatctaatacatgtatatagtctctaactccagttccatcatgtgttggataatcattaccataaacactcaattccttcaatttacctactgctatttttgttatataaggcattagattgctcggaactccatttggttcttcacctattctaccacttttatgagcaccaactggattaaagtatcttaaaagagctatatccaatgacttatctgcttttgatatatctactaacatctgctctatcataagtttagttcttccatatggattggttacagaaagtgggaaatcctctaatataggacaagtatgtgggtctccatatacagtagctgaagaactaaatacaaactttttaacaccatattctctcattaattcaaataaatttaaggtacttattagattattgctgtaatattcaattggtttttctactgattcaccaactgcttttaaagctgcaaagtgtataattgattcaatattattttctttaaatacaacatgcatttcatctttatttctgatatcaatattataaaattttactggttttttagataattccttaattctatcaaccactattgagttgctattacttaagttatcaactataacaacttcataacctgattctaaaagttctattgctgtatggcttcctatatatcctgctcctccagctactaaaactgccattgtaattacctcttttctaatattttatttttcacttactttttttctcatatagtccattaaatcatcttttaaattttctctctttagagcaaagtctattgttgcctctaaaaaaccaatcttatctcccacatcatatcttctaccttcaaagttataagcataaatagcctcttgttttccaagagtttgaagtgcatctgtcagttgtatctctccacctttaccaggtgtctgtttctctaatatactaaatattgcaggagttattatatatcttccaagtatagctatatcagatggagcttcttcaattgcaggtttttcaaccatatctttaactttatatactctatcttcgatatgttttacatccaatataccatatttattagtatcttctttagctatcttttgaacacctaatacagttgttttatactcattataagtatctattaattgttttaagcacggaacatctgaatctactatatcatcacctaataatacggcaaaaggttcatcacctataaaactttttgcacagtaaattgcatgtccaagaccttttggctctttttgtcttatataatgaatatttaccatatttgatatgtctcttaccatttctaacatctctgtcttacctttttgctctagttctaactctaattcaactgatttatcaaaatgatcttctatagattttttatttctacctgttattataagaatttcttcaattcccgattctatagcttcttctattatatactgtaaagttggtttatctactataggaagcatttctttgggctgtgattttgttgctggtaaaaatctggttcctagccctgctgctggtattattgcttttttaactgtcatctgcattttttcacccttcttcgtaaattttctattgtaccaaattaatataccatatttatactttttcttcaaactctatattatcccaatatttaatgctataagataatataaggtagatgaaatttcatctacctttagttttataagttaatattgtattgtttatattttatccaaaacttatacaggtactaaatttcatctaagatgccttttatatcactatctatatcttcatctagataagaatctaaatcttctaagtcaacttctagttcttgatatgtcatatcaacactgacatcctcatctatatccatttctgatattaattctcctaaaatactatttccatcagaatctaaaccactatctatatcttcatctatatagttttcatttaaaatttcatctaaatcaatctcgtaataaacttcattatttttttcatcccctgagtccaatcctaagaactcatagttaaaagtccaaacattgtatttacttgacatactttattcctcctgtgaaaaacatattttcatctagtttattggttccataatcaacagagttatatattttttcaattatgtcttttcttctttcttttgtactattatttaatgtcaattgtttaaatacatatgtatttgttattctctcgaataatatttcttttatactatcatcatcaatatttctatagtttttccacaataactcaaataacttaaacatttccctactagtttcatctacataataaggatacatattttctactaaatggtttaatcttgatatggcttgttttaaaaatacatcaagacttgcactttcactttcttttaacattctataattgtatttcttcttatcttctcctgaaattacaaagatgatattgtctaaacttttttcaacttcatttaaataactgcttatattatatgataagtcagacaatagatttttaatctgcttaaacacttgtacatcaagtttagtattatacttttcaaacaaatctatttcttgattttctaatattcttggcatatatgctgacaataaatctaaattgtttctttgttcttgtatttgcttataaagtgaatttataacttctattcttatttcatcatttaactctttttctaaaatcttatcaaattcagatttcatatagtaaatatttccaaaaaaattaaatattatcatatcattcatagctttagaccaattcttatatatcacttcaatagaattttctttaagtagaggttgctttgcatatataaatacatcttgcataagtttttgaaccatatttttacttaagtttaaaagtactttttgattattaaattttatttccgtttctacaaaattagaattttcgttttcaagttctttattaattacaatgtcttttatatcactattttttatagatatgatttctttttgaaaagactttagaatagtcaagctatcgaaatcttcttgaataaaaaatggagcatgttttaatgtatatcccactatttcattttctatatcttttaagtcatctatttgcataatttctctatttttatcatttatatgtaggttaaatacatttttattatcatataatattatatcttctcctaaatttaacttagaacaattatctttcgctgactttacaatagtcttcttagatttcttatttataaaaattaattggtcttgatattttactaaaagcatgtttgtgtttttataatcaaatccatctatatttcctgatatcttgcagaatactatatcacaatctttaggaagatttcctattttttggttatctttaactctctcatttaaatcagatggaactacactatctatattgttattaaatatagatacagaccttactataatcccctctctttccatatgaaagtatcccttcaatgacactcttttatcttctaaaatgtatctttctatatcatcaaaatttatttcaaatctatttttcccactgataaatataaacttctcattatctttattaattccacccatataaaacttattgtcatctaaacttaatatagtcatattatcctttagatagaatataaattctctttgacttttgcagattaaatcatattcatccaaagttattttcatagtcaaatttgctgtaacatttttacttgaattttcactttttatgtaaaaaggcaagttatttccatagacaattatttgagaatcttctaaaactgcctctaatttttctttattgtctgaaaaactatatatatattttacacctgtatcctcattaacttcatctgatttgctgattattatattccctagatttgttatatgaagctttttatattcttttgagtatctacttatgccactaagctcaaacccatcagaaagctcatatatgattttttctcctaatttcaacataccttcaccacctaaacagaattataagtattttataaaggtgaataaaatgtctcaaaacaaataatatttttttaatactttttattctgagacatagtttctccttttttataatgctctaagcaccttcaactatttcttcataaagtttatctaaatgtttaacatattcacgatatccagatttgttctttaactcacttcttaaatcttcatatttttgtttaagttcttcagcactcaaagaaggagctgattcttttaattcttctaacttataatcatagtacttatcatacatagctatatatgtatcaatagatttcttagctagttcattacatttttcttgtgcttctccatattgagaataatcacctatttttattttatagtatccattttcttgaattattgttgaagaaatacctttagcctcatattcttttgctgtttcttttgctgttttttcaactttaagtgaacctgcataaacagtgtaatatacacctttaccatctttatatgcttccatttcttttgctttcttttcagcttgtgctttttcttgagcctctttttcagcttttgccttttcttctgcttcttttttctctttttcagcttgtgcttttttctcttcctcagttaatttattgttagcttgttgttgagttgatgactttggaatattctctttatcatttttcttattgttgcctactgttataaaatatcctacaccaacaataaccactataactactgctataatagtttcttttaatctactcttcttagaaacaacctcttcatcatctaaagaatcttctttatctgatacataatttttcatttctttcttgttttctctatatttgtccttagaagaatttttagattttttattactattttctttctttttaataggtattactactgatttttcattttctaatttttcttcttttatttcttttgcttttttatcttctaagtttttactttctttttcaagcttcgattcattatttgaagatactttttcatctaagttattatttattggtttttctatttttacactacgttcttcttctatatgttgacttggttcttcttgttttatttcttttaattcattttgctctatttcttctgattttgcttgatgattttcaactggtttatctaaaattatatcaggagaaatatcatttaaattctcttcttcttgttcaacttcttcattgtcttttttaataaatccaaataatttagccttctttttactctttttattttctggttcaattatatcttctttattgctgtcgtactctttatctgtagtatctttatcttctacaacgtcacctatatcttgattattactatctacttcttctttagccccttcttcagcatcatcttctattgaaatactacttctaaagcaaatatctttatctgcattttttatcatgtaaatgtattcttcaatatcgatatctttatttcttctagttctttttgatgcaatttcatgattttctaattcactatagttatcttttattagattctgtgctttattccatgtatcttcactaatttctgttttatttttaattacatagtccacaaattccttaaaattttcaggaccaaattctccaattatagtcagtctcattgcaccttctataaggtctctatttcttctctttaaaaattctaatacaaccgttgcacaagcaaaatctttaataatttctttgccaaaaccatatccttcaacagaatgaagttcttctaatccacataacttcttatattcattgtgtattgtttgagatatactttcattatttaagctatttaacttatctataaacttcgattctatatcatttgattttgattcatgttttacttttgaatttttaatttcatttagtagcatgtcattttctgaattatctttacctaattgcaaatcctcaatttcagttgcttttatttctactttgtcttgttcgttattctcttccacattattaggtaccacatctttattgctagctaatattttgtttacacagaatataatttctctttttaattctcttttcgcatctgcttgatttttaagaaataaatctccacattctttcttttctaaacttatttttctaagagatatattaaggaggtctttatataggtttaaaaccttataatccttttctaaacgtcttcttctctctgatagttccattttatcataagctaaaaaactatttaaatcattggcttttagagagtctaatccctctttcatagccttatttacatactttctacattttgctgtagttaattctaaatctttttctaattcatctatttcaggtatgtacttatctactatccatttgccaataagtggttctgtatttcttgctaatgtcttataaaacaatatattaaattttaaaagctctgcatattttgcttcattaaattctactttttcaaatttcttttccaaaacaccatctagcttttcatttattttagactcttgttttaaaaaacttgctgtgacatttaaaacagtgtttcttattatattattttcactcaaaaccttcactccttaaatcaattattttattgtaatatttacattgtgcaaagttgctaatttgattatgatatctaaataattatttactaaatttgctacatcttatatcatatcatattatttacatcattttactttttctttttatatctatcttatattataccatttttaatatctgtactaacttatattacaatattcctcaaaattttaaaagtagattagacaaatttacaaataaaaaaacatcagtttaaactgatgtttttgactatcgaaataattaagcaagtctataagcggagttctgtattagataatcatctttctaggcctattgtcaccaataggctcaagcgacctacctaccggagagtacgagcagcactctttattcctatcttggtcttgctccaggtggggtttacatagccaactagtcgcctagctgctggtgagctcttacctcgcctttccatccttaccacaatagtggcggtttatttctgttgcactatccttaggatcgctcccactaggcgttacctagcaccctgctctatggagctccgactttcctcatgtaagattacatgcgattatctggcttacttaatatttattttacttagttatgttaacacaaattcttttacatgtcaaagtaatattatactaaaaatttaaatttattcaaaaatagtgtaatatagatatataaactccatttaactcgaggtgatatattgaaaaaattatatagaatagtaattaacattatactagtattagtaatactttacagtggatttaatatatactcaaaacttaccaaatacaatcatgatactaaaacatcctcagaacttcaaaaaaaagaatataaaaaagaggatttatcaaagattaacagtgattttaaattttggctttctgttgagaatacaaatataaattatccagttgtacaatctaaagataattcttactatcttgacaaagatttttataaaaaagattctatttctggtacactgtttatggattatagaaataaatctattgatgacaaaaatatcataatatatggacataatatgaaaaataaaactatgttcaacaacctaaataagtttaaagatgctgacttctttaaaaacaataataaaataaaaataaccttgaatggaaaagaatttttatatgatgttttttctgcttatattgtagaatctgattatgattatctaaaaacaaattttaacaatgaatctgattatcaaaattacataaatgatattacttctaaatcattgtataaatctcctattaaggtaaatagcaatgataaaatagttacactttctacatgtacctatgaatttgatgatgccagaatggtgattcatggtagattgatttaaaactcacagacacagtttaaaacaataattttaaactgtgtcatcttttatacctataatttataaattaggccactaaaagtatgtaatacaaaataacaaatacatcaaacaataaaaaacaataaaaaaagactatgctaaaaacatagtctttactggagctggtgataggaatcgaacctacaacctgctgattacaagtcagctgctctaccgttgagccacaccagcacacctattctattgtaaattagtaaaactaatttttaaaagttaacactctaaaaactacacatatatcttaatgaatgaacatcaaataaatattggtcaagtcctcgacctattagtatcgataagctaaatacattgctgcacttacaccttcgacctatcaaccagatagtctttctggggtcttacccttgcggtgggaaatcttatcttgaagttggcttcgcgcttagatgctttcagcgcttatccattccgtacatagctacccagccatgcccttggcagaacaactggtacaccagaggtacgtccatcccggtcctctcgtactaaggacaggtcttctcaaatttcctacgcctgcgacggatagggaccgaactgtctcacgacgttctgaacccagctcgcgtaccactttaatgggcgaacagcccaacccttgggacctactacagccccaggatgtgatgagccgacatcgaggtgccaaacctccccgtcgatgtggactcttgggggagataagcctgttatccccagggtagcttttatccgttgagcgatggcccttccacgcagaaccaccggatcactaagtccgattttcatccttgctcgacctgtatgtcttgcaatcaagctctcttttgcctttacactctacgtacgatttccgaccgtactgagagaacctttgagcgcctccgttaccttttgggaggcgaccgccccagtcaaactgcccacctgacagtgtcccaagaccagattcatggcctatggttagagtcccagtactacaagggtggtatcccaaggatggctccgccaaaactggcgtcctggtttcaaagcctcccacctatcctgtacatgtagtaccaagacccaatgtcaagctacagtaaagctccatggggtctttccgtcctgtcgcaggtatccggcatcttcaccggaattacaatttcaccgagtctgttgttgagacagtgcccaaatcgttacgcctttcgtgcgggtcggaacttacccgacaaggaatttcgctaccttaggaccgttatagttacggccgccgtttactggggcttaagttcactgcttcgattgctctaacagatccccttaaccttccagcaccgggcaggcgtcagctcctatacatcgtcttgcgacttagcagaaacctatgtttttggtaaacagtcgcttgggcctattctctgcggccacctgatggtggcaccccttatccctaagttacggggtcattttgccgagttccttaacaacagttctctcgctggccttaggatactctcctcacccacctgtgtcggtttgcggtacgggtacctttaacctcgatagagacttttcttgacagtgtgaaatcagctacttcgctactaaatttcgctccccatcacatcccagcattatcaaagcggatttgcctactttgactgcctcaatgcttgggcacacataaccaacagtgtgcttagcttatcctactgtgtcatcccttctctcaaacggttatcggtagtacaggaatatcaacctgttgtccatcacctacgcctttcggcctcagcttaggtcccgactaacccagggcggacgaaccttcccctggaaaccttgggtttacggcctgtgggattctcacccacatctcgctactcatgccaacattctcactcccatactgtccacatgtccttacggtcatgcttcaacccgtatgggaagctcccctacccatcattactgatgccgtagcttcggtagtaagttttagccccggaaatcttcggcgcaggatcactcgaccagtgagctattacgcactctttgaatgagtggctgcttctaagccaacatcctggttgtctgtgcaatcccacatcctttaccacttaacttacatttagggaccttagctgacgatctgggctgttgccctttcgactatgaatcttatcacccacagtctgactcccaagtataagatgacggcattcggagtttgatagtcttcggtaggtgcaataccccctaggacattcagtgctctacctccgtatctctcaccttgaggctagccctaaagctatttcggggagaaccagctatctccgggctcgattggaatttcaccgctacccacaagtcatccccgagcttttcaacgctcgtgggttcggacctccacgaaattttactttcgcttcatcctgctcatgggtaggtcgcccggtttcgggtctacgtcaagtaactgaacgctcagttaaaactcgctttcgctacggctccgcaccttaagtgcttaaccttgctacttaacgtaactcgttggcccgttctacaaaaagtacgcggtcacacaagaaatgtgcttccacagcttgtaagtgcagggtttcaggttctatttcactcccctcccggggttcttttcacctttccctcacggtactatacgctatcggtcactaggtagtatttagccttggagggtggtccctcctgcttcccacagggtttcacgtgtcccgtggtactctggatcatatctgaagtcttctcgtttaacatacaggactattaccttctgtggtgggtctttccaaacctcttcaattacgatacctcttcgttatgatatgtccgcaaccccaataaagaaaactttattggtttgggctaatccgcgttcgctcgccgctacttacggaatcgaatttctttctcttccttcaggtacttagatgtttcagttccctgagttcccctcattaagctatgtattcacttaatgatacttagacattactctaagtgagtttcctcattcggaaatcttcggatcaaagtttacgtgcaactccccgaagcttatcgcagcttatcacgtccttcatcggctcctagtgccaaggcatccgccctgcacccttaataacttgaccagttaaaaaggtttgatagattagaagctatcaacttcgataattttaaaaagttatcagctttatatattacaaattagatgtcatatcactaaatatatatgcagttttcaaagtgctaaaagtgctaattttgagtattcgtaaaaacgaaccctcaaaattaaacagtaggtaattctccttagaaaggaggtgatccagccgcaccttccgatacggctaccttgttacgacttcaccccagttattgattccaccttcgacgacttcttccaaaaggttagataatcggcttcgggcgtctccaactcccgtggtgtgacgggcggtgtgtacaagacccgggaacgcattcaccgcagcattctgatctgcgattactagtaactccagcttcatgtaggcgagtttcagcctacaatccgaactgagagtagctttaagggattagctccaccttacggcttggcaaccctctgtactacccattgtagcacgtgtgtagccctaagcataaggggcatgatgatttgacgtcatccccaccttcctccaggttatccctggcagtctctctagagtgcccaacttaatgatggcaactaaagacaagggttgcgctcgttgcgggacttaacccaacatctcacgacacgagctgacgacaaccatgcaccacctgtcaccaatgtccccgaagggaactctccgattaaggagatgtcattgggatgtcaagcttaggtaaggttcttcgcgttgcttcgaattaaaccacatgctccgctacttgtgcgggtccccgtcaattcctttgagtttcactcttgcgagcgtacttcccaggcggagtacttaatgcgttagctgcggcaccgaagggggtaacccccgacacctagtactcatcgtttacagcgtggactaccagggtatctaatcctgtttgctccccacgctttcgtgcctcagcgtcagttacagtccagagagccgccttcgcaactggtgttcctcctaatatctacgcatttcaccgctacactaggaattccactctcctctcctgcactcaagtctcccagtttcaagagcttactacggttgagccgtagcctttcactcctgacttgaaagaccgcctacgcaccctttacgcccagtaaatccggataacgctagccccctacgtattaccgcggctgctggcacgtagttagccggggcttcctcctcaagtaccgtcattatcttccttgaggacagagttttacgacccgaaggccttcatcactcacgcggcgttgctgcatcaggctttcgcccattgtgcaatattccccactgctgcctcccgtaggagtttggaccgtgtctcagttccaatgtggccgatcaccctctcaggtcggctactgatcgtcgccttggtaagccgttaccttaccaactagctaatcagacgcgggtccatcctgtactggctcacctttgatattcaagagatgcctctcaaatatattatcccgtattagcatacctttcggtatgttatccgtgtgtacagggtaggttacccacgcgttactcacccgtccgccgctctttaccgaagtaaatcgctcaacttgcatgtgttaggcacgccgccagcgttcatcctgagccaggatcaaactctcaaataaaagtttatcaggctcagatactattgttatcaaaatatctggctttatggtttgtttcttgttttataaattaacctactgtttaattttcaaagttcatttcattcaattaacttctttgtgcttgttattttgttacttcttgttgagcacatttattataataacatcttctcataatatggtcaactatttttttcatttttttttaaatttattgattattcaccctttgtcatactattgtgactttatttttaaagatataactattattaatagtaatttccaattataataatactatatgcaattattattaatttagaaaggagcttcaaaatgtttagaaaagtattgcattatttaacactactttctatttctattttttttattgttggatgttcaaattcacaaaacaatcaaaacgaaaatcaaaataaggaaacacagttacaagaagataaggaaaaaatagatggtggtaaggatacttccaatgtaatagtttcagacggaacagataaaccatcaaaagccactactaataatgataataataaattagatgtatcttctttagataacactactcttgattggttttatatacctaacaataagcataaaacaccagaagtaaatacggacattgaatttaaattttctgactatgatgccctatacaatggacctacaaaagatggtcaaaaaacactatatcttacatttgatgaaggttatgaaaatggatacactacaaagatactcgacactctaaaacaaaaccaggttaaagcagttttttttgttacagctccatatataaaagaaaataaagatttagtaaaaagaatggtttctgagggacatatagttggaaatcatagtaaaacccatccatctatgccaacaaaaacaagcaatctaaaaaactttaatgacgaattatatgatgttgaaaagttatataaagatgtaactgggaaagatatggttaaattttttagacctcctatgggaaaatactcagaaaaaagcttggcaatgactaaaaatttaggatacaagactgtattttggagttttgcatacagagactgggatactgataaacaaccatcacatgaagaagcaacgcaaaaaataatggataatctacatgatggttctatcttgttactacatgcagtttccaaaactagtacagaaattttaaatgattttatatcaaatgcaagaaaactaggatatgaatttgaactcttggagtattaatatttagaattacatctaaagtctacaaactaatatagttaatataatatagattataaaataataaattaaaattaaaatttttgtttggtgatagtataggtaaaaaacttgcgatagcttatatatgttggtgggacagggtaataaaacatcaaaaaatttggcaagatattaaacatagataacagtattttagatgttatatttagatgttatgtatagtataatgaaaaatattattttattaaagaatactaataaaaatatcaataaaaatagatgtatggcttaaaattagtaaaacaattataataaattatagctacacatctatttttaatttgtacaattaaagatttattcgatttattaaataataaacattgctactatggttgttacaaccaatccggttataactgggacaaagtttcgctttgccaactctattggactaaccccacaaattgccgctgctgaaataagaccccaaggaactagacagcctccacctacccatataccactgatttgtcctaatgcagctaatgcaccaacacttgcatttatagcagttccaaatacagaggcaagtgaaccaactaatgaaatcccagaaaatccagaaccatcaagcccagttattgcccccactacagtttctatacctgatacggcaaatttattaagtggtattgtttgagaaagagctatgcctatatctgataataaaccttgtgaacctggtgctaatacttttccaaatacacctgtcaagggcgcaacttcacccatatagaaaaatgctgctattggtataattgctccaaatatttttatcccaaacacaaaaccatcaattatattctcacatacattttcaagactatctttgccaaaatttataacatttataattattattaaaaatactgctgttccacccaaaagagctgatgcatctcctccttttaggtcaaatatatacataacaattatatcagcaagaaatcccagagctactaaaatagttgctattttagattttccattgaactcttctacttcttcactttcaaaaccttttagttcttctctaaacattcctttgttaatatctctttttaatgtataaaatgccatagatatggttacgattcccatcacccaaaacaaaatcataccatcatttataacatatgatactgcaacacctgctgcaccagctgttatacttggagctccttgaataacaaagtctgtagacaaggcaagaccatgaccaaataaatttaatgctactgcaacaccaattgctggtagcccagctctcatagcaacaggtaaaaatacagctccaactaaggcaacagctggagttggccagaaaaaccaagaaagaactaacataacaaatccagttacaaaaaatgctgtattagaattttttataactctcgaaaatggtctcaccatatactgtatagcattattggcttctagggctttagataatgcaaccataatagctataatcaagataattggacccaactcatttaaagatataataaaagagttaaacactgctgttatagcaccaaagatgtttttttcaaagaacaatcccataaaaaaaacacctaatatacatggtactattgtatcctttttcataatcatagtaattaatataattaccataaatagaatgtaaatataatgtgctcctgtcaaaaccatattattatgtcccctttttttaagataataatattatatggtcttgtaagtaaacttgttacttgcctagaggtacacaatattgaacatcccataactaaagtcacatgcttcctgcttcatagaattttacataagcaattacacaatatataatagcaattacacaatatataatttaaatttttatgattcttttgctggaatagatatttcaatagcaaattctttatcatctgaatttacatttatgcttccattatgatatgcaactattttctcacaattctttataccaattccaaaactttctacattcttagaaaaattacttactctatttttttgtataattagtaatttagaatcctctactttaattaaaaatactataggcttatctttcctagcatattttattatattagaacataaattatcaaatatccttctaaattgtgtaacatctacataaatatgatattggttataaagttcattttctattgttatatgaaatcctttctcctccaatgtatatgaactatctaaaagtaattgaaaaataaattcattagcatttattttttcatacccttttgaaacttcctctccagaattaacaaaatgcgtaaaaaggtcatctgttaaatcttttatttgatatgctttagaccttacattttttatgtattgttccaattgctcaggactattgtatttatggtctttgatcaaatctaaataacaaattactgatgttaatggagttctaacatcatgtgatatcgaagttactatatctttatttttattcttcatctccctttcttttataagttgattctccaatgtatgactcatctcattaatactagatgcaagtgatgataattcatcattaccttttactgggattctatactttaaactgccactctctactatctttatacccatttctattttccttaggtactttatctttctactaaacaacagtaaaaatgttataataaatgtaagtgccataaatgtaatagaaattgcttctataaaattttgaaatctaaatctaaataaagctactacaactatattagctttaatatcagaaaattgtatctcatagtttctagccatgggactgctataaaactcattttcctcactcttatcaggtacttcattaggatagtataatgtatcataaaaaaccttatttcctttatatatcttcatagaaacaaaccaattatcactattccattttgctatatcatctccatcatctgctcttataccattgttattcacataagtttgaaaattatccataagttgatttacttctcttttaaaatatactttcccttctgatacatcttttactatagattcaacagcagagtaaaatggtatatttaaaatgaaagccactgcagctgagattactacatatatcaatagtataactcccaacttagatggcttaattttgttaatcaatataatacccctttccccatgcggtttttatatattgtggatttttttggtctttttctaacttttttcttaaatttctaatatgaaccattattgtattatttgccgtataaaaatactgctcatcccaaatagtttcatataaattttcagacgaaaaaactttttttctatttttcaacataagaattaatatactatattctatagttgtcaaaaacacaggttctccatttagtgtaacatcttgagtatctaaattgacacataactcttttgtttttaatatatttggctctctttccttttcctttccctggtatatataataacgtctaagtagcgacttaacccttgaaattagttcagaatatgaaaaaggctttgataaatagtcatctcctcctgctgaaaatccaataactttatcagagtcttgagtttttgcagttaaaaataatattggtgctgtcgttttttctctaatttcattacatgcaacaaatcctgtttttacaggcattacaacatccaaaataatcaaatcaatcgtactatctactaagtttacagcttcttctccattcgttgccataataacttcataaccttcaccagttaaaagtatttctacgatttccctaatctcaggattatcatcagctactaaaattttttttggaatctctttattcatcaccaagctcctttttttgctatatttcttaaatatttcaaactatataaaatattatactttattagcaaaagcttagcaatgtcacacgttttaatagtttatactcctgtaaacatgtttaaaacttaattaaaatgtacacacaaattgacatattaataaaaataatctatataatattatcttacataagcaacttttttcactgcttttactttttcagaagattttacatgtactactatacatatcaatccacttatagctacaaatgcataaaaacttattcccctactaagtaacattgccggaactaataagtgaccagggaaaaatatcttaaataatgtcataaaactattttcagaagctccaacagcccctggcaatggtaatgaagaaacagcaatattaagcaaggattgtatcgctaatatctcaaatacagtatatgttgatagatgaaaagctttgtatacaaagaaaggaactaaaaacatagctgttatttgtacaatagttatgactaaaatttggactacaagttttggattctgctttatatattgagcacctttaacatactcttcaatttgagatattataacttttcttgaactttcaacatcttttattattcttaacttacctaataaatttgttattgatattataaaattgtttacaagtttttttgaaaatataattgcaattactccaatgacaagagcaacatttgttattacaccatatattagtaaaatgttcataccacttacattatttaatataaactcacgttccataatgaacattattccactatatgccagtataactacttggtgaataacaacaatgactaatagtataagtgaagaatatgatatatttatatcgtcttttttcatataataaacttgtgctggttgaccacctgatgctgaaggcgtaatagaactaaaataaaatccaataaaagcatatcccatacattttaaaagagtagttttttggtttaaagctttcatacctaagtatatatttataccttcacaggcaacatatataaacatcattgcaaatccaattagtataaacatagggcttgcaccttttaatgattttatcaatgattcaactgactgccctctaaaaacaaaatatcctgttatgcccattagtaaaactaaaaaagctacactacctaggcatttatttttcttttcagttttacttatcataactacatcctttctggtgttacgaactttaaaccactggctttaagttttggaatagctatctttaaagcttcaatagtacgctcaggtgcacctactgcaccacctgaattttcacctgcatcatgtaaacaaattatagaattttcttttgttctactcattaacttgtttataataatgtctactgtactatctttctcccaatcttctgccattacatcccacaaagtcatttttagattatattttttaacaaatgaatttgaaaatatattagtatgaccccatggtggacgatagtagtttacatctacacctaaatttttcattatatttgtactttcaataaaatcttttttaacataactataactataaagccatgcatttctgtgttccaatgaatgtaaaccaactatatgattttctctcaacattctttttataatttcaggctctttttcagcattctttgctactacaaaaaacatagcttgtatatcattttcttttaacacatctagtaatttttctgtatatctcttatctggaccatcatcaaatgtaagtgcaatttcattttctccagccatattttttaatacctctttatttaatagtttattatagtatgtaggtataattgaatggactaaaaaaatcaatgcaacaacgataattaaacctactacatacattctctacacgctccttgttcatcaagtgaaaataaaatattctctaaggtattattgtcaaattgtttttttaattctttcatgttactgctcatttctttaagagtagcatcatcataaattaaatcttttatctcatctacatagtattttttatttttaccaagtattctcccaatttcattatttaatataaaactagcattatctatctcttgttgtaaaaatggattaaatgccaatattggaagttctgaataaattgtttcaaatagtgttattccacctggtttagaaataataaggtcagaatctttcatatatttatatacttcattggtgtaacctactacctctatattttcatatctaccatatagtttatagtacatttttttattattaccagttattacagtagtttttactccttctaaactatttaattctttgtaaaattgttctgatttaggcagtaatcctaatcctccacccattataagaatattttttttagttgaatgatttacatgttctattcttttaaattctttttttactggaataccattaactttaatcttagattcatctattcctttaaaaacaagttcttccttagtagatttactagctactaaataacagtctgtatttttactaatccattctgagtgactacttatatcagttatgcatgttattaaaggaagatttgagttatatttttccttatatcttgatactaattgagaacaaaatggaaaagttgaaataactactgttggttgtacttcatgaagtaatgtatctaatttatttaaaaaataatctgaaaaagtaaattttatatctttctttccattttcagcacatttataaaacaaattataaagactacttccccgatttacaagaatagaaaaagtcttgtacattttatctgaatagttaggcataatgtattcaaatatatctttaattgttatttctgaattatcaaattttgcttttatatcttcacttaaagaatttgatgctgagtaatgacccataccaaattttcctgtaagaattaataccttcataagattccctcctcgttaaagcttttcttttcatatgattactatacttataagtatagactttaaatctttagaaaaacctagtataattcttaagaaatcttaaagttttaattaaaaaatacaaagagaccatctaaaaatagagataaccatattttttattatttaaataacacaaatatgttcgattccatacaaaaaagtgcctcataaactaaaaagttcattttgagacaccttttttatatctaaatatattcaaatacatacacaatcattgtaattatttaaatgtattttatttagttgttctttataattaatccataatattatattcttcatataaaggatatttttcagttaaaccaacaaccaatgttctagccttagattcttcatcataagttaaacataggtctatagcctcagcgattattgccatatcttcttctttcatacctctagtagttacagctggagtaccaagtcttattccacttgtaacaagagcaccatttggatcaaatggaattgtatttttattagctgttatataagcatcatccaatctcttttctgctgctttaccagttatatttttattaatcaaatctaatagtattaaatgattatctgtacctccagaaatcaatttaaaatctcttttaataagttcttcagctaaggcttttgcatttttagcaacttgtacctgatattctttaaactcatcacttaaagcttctttaaagcaaactgccttagaagcaattatatgttcaagaggtccaccttgaataccagggaatattgctttgtctatgtctttagcatatttttctttacaaagaataacacccccacgaggtcctcttaaagttttgtgagttgttgttgtaacaaaatcagccacttcacatggattttggtgaataccagcagccacaagacctgctatatgagccatatctaccataagcaatgctccaacctcatcagctatctctctaaactttttaaaatctatttctctaggatatgcacttgctcctgcaactatcattttaggttttacttcatgtgctatctttctaacttcatcaaaatctataagtccactgtctttatctataccatattcataaaatttataatattgaccagaaatattaactggagcaccatgagttaaatgtccaccttgagataaattcattcccataacaacatcacctggttttaacatagcaaaatatacaccaatatttgcatttgctccagagtgaggttgaacattagcatgttctgctccaaatatttttttgattctatctattgcaagagtttcaacttcatctatgtattcacatccaccataatatcttttgcctgagtaaccttctgcatacttatttgtaagatgacttcccatagtttccattactggaactgatactatgttttcagatgctattaattcaatatttctttgttgtctttttaactctcttttcatactttcataaatctcaggatccgcttttttcaagttctcaaacatattactcctcctagttattatttaaattttatttttacagacatttcataattttcgtttttatcaatatgataatttattattatagtcctttaccaattaatagtcaagtgttttgccatttttccatatttaacatagttactttctttatttttaagttaaaatataataaataatattgtctaattcttttaattggatataatttaaatgtgactattttgaaacaaaaaaaagataatatatttatatagatattaaggaatattacttaaaaatttgatataatttcaatattacgttttttaatttggaggtgtatttatgaatcaaaatgaggaacttgaatataagaaaaatattctaaaactagctctatttgtaggggaactgatgataaaaaatggagctgaaacatctagggttgaagacagtgtccttagaatatgcaggtcaagagggttttatcatgtaaatatttttacaactcctacagtaataattatttcagatgagaaatttgatggcttttcgtttatgaaaacgattcaatcaagaggtataaacttaaacaagatttctttattaaacagtttttctcgagaatttgttagtgacaaagagtatgatattgataatgccattgcacgtctttatgaaatccaagatgtaaaaccttatcctttatggttattttactcttgtacaggaattgcatctgcttgttttgcttgtttgcttggagggaattatgtattaaattttatacttacgtttataatagcaatctttgctgcaattacttatgataaaacgatgaagataagtgcaatatctgcattttcctgtttagtatcttcttttttaattgcactttcaggagttctactagttgaaataggcattttagatgaccctaaaatgcttatagtcggcgctataatgccactactcccaggagttgcttttataaaagctattagagatttaatatcagggaatttaatatcaggaatttctcgtgcttttgatgctgctatgattattattgcaattgcttctggagttggttttgtccttgatacatggtatagaataggaggtcctttctaatgactgatatgtctatgattttgcattttttattttcaggtgttgcaactgctggatttgctgttttctttaatgctccactatatctacttcttccagctggagtaactggcggaattggttggattgtatatgtttatttatttaattttactacaaatgcagtttttgcaggttttattgctgctgctttggtctcagcgtgtagtgagactttagcaagaaaactaaagcaaccagctattgtgttcgtaattccaggtattcttcctctaataccaggaattgggctatataatacaatgttgtctttgattcagaaaaattattctttggctatgtcaaaaggtacagatgcgctatttctaagtgctgcaatagcacttggtgtattagttgtaacttcttttgtaagaacattgaatcttttgaaaatcagaaaaaactttattccttacagaaaatcaaaataaaaatataaaaatagcaatgtacttaaactctacaaatacgtattgagtatttatttaaaaagcacattgctattttttaattataattatcttaaaggtcaattaatattcttgttattactggtataaattctctactgtctctaaattttttgtcattcttctttaagtataaataacagattattgtaagacaaattccaactaatccacttatggcttcaactccagttgtcattccaattgcccccaatatataataagtccctattgttcctacaagaagtgctataagaggtattatataagccattacagctgcttttaatacattcatattatccatactcacttctacatggtcaccaacttttgcaccaattgtgttgtctacttctactaatatttcttttgactctgctgaatttgtagtagcacattttccacaagcagcacaagctgaatgtctttgcatttttaactttgcagttctatcatcaacaatttccataataaatccttgttgattcataactaaccgcctccttattttgtaaatttatttatagtatccataagctcttttatcatctcttcagttttatcagcatcatcatgtttaatgctttctgctacacatccttttatatgattctctaagataattgtgcctactctatttatagcagaccttatagcagatatttgaaccaatatatcaacacaataacgttcttgttccaccatcttttgtatccccttaacttgaccttctattctttttaatctttttatgagagcttccctctcattgtttggtgctaattttctttcttccataaactcacctcatactctaatgatgtcttatacaattatgctctacttaccaacttgtttaaaatataatacggttattattactataaatgccaaaattgatattgcaatagacctactttgattcttagtttgttccatacttaactttccattcatcttaaatcctgccaatgggaataaaaatataaccagtgcatcaattccaagtacaacttgggctgcaatagtccatttactcaaaaagcagaatattccgcccacacctaaaagaacctctaatatatttataaacttatatgtaggtttttttgctatatattcttcaattttttccttacattctgcacgacatggatatatattcatattgtcatcatattttatagctaatttattatttggtgactttatatccctattacagtaaagacattttttcattttatattctcctctagtcttccttaaaaaattttgcctaaattattatacgctctaatactattataccaaatagatacaaaaaacaaaaataaaaggaataattttagctacttcttttacttcaatgtgtagtctataataaatttataataataattaaataatattatttaatctaatttaattattatgtaatctaaaataagtcaaatttgtatgagaggttaaaatgaaacaaatggaattagctattgtaagtttaaaaaaagacgctggagaaatttatgaaaatcaaataaggcaattcttaggtgataatctaaagataaatttatactcatttgaagagggaaatttaaagttttttaaagaaaaacttatactcctatctgcttatttaaaatacgatgaaatagtaaaattatctcactatgatgctcaaatcattgttcccaagttgacatttgaaaagaacagtattgatatgatatccaaattagaaaaagataaaattatttatgtatataacttaagtaaagatatggcaatagaaacaatttctttaatacatagattaggaatagacaatataaatatcctgccctgctatccagagattgagtttactcccacagatgctgtaatcctaactcctggcgaaaaaatcctgcctaagtttaaaaattgtgaagttgtagatttaaaatacagaataatagatttaagttgtattgttgaaattgctacaaaaaccaaattaaaacatctaataaaagatgacctaataaaaaaatacgtagaaaaaataattcctacaagttatagtacaggtgagttattgttagatgcaaataagtttgaaagacaatttgatttgttactatctataattgatgatggaattatatgcacaaataatgatggaataattcaattctataatcatatagctagaaaaattttgtctataaatgcaaatgaaatgattgactcatttgttggtgattgtataaaagacatcaattttcaaaacatattgaccaataaaactccattttttgagaaattgattaaaataaatcatattgatataaatttagagattaaacatatacaattaaatgtatttgatggatttatactaaagatgacaaagttttctcaattagaaaaaaagcaagctaaattaagagcacaactagtaaactctggtaatatcagtaaatacacatttgatgatatattaggttctagtatacaaactattaatacaaaaaaaattgctaataaaatggctcaatcaaattcatctatccttataattggtgaaagtggtactggtaaagaattatttgctcaatccattcatagtgcttctaggagaaaagatggtccctttgtcgcagtaaattgtagtacttttcaagaaaatctactgcaaagtgaattatttggctatgatgaaggggcttttactggtgctaaaaaaggtgggaaaattggtttatttgaattagccaacaatggaactatatttttagacgaaattggagaaatggatttaaattctcaatctaaattacttagagtcatacaagaaaaacaagtacgacgtattggttctaataatgtcattgatattgatgtaagaataattgcagctactaatagaaatttaaaagaacttgtatctaaaaatatgtttagaagagatttatattttaggttgaatgttcttccccttaaaatacatccacttagggaaagagctgctgatatatttgaaatttttggttcattaaaatatgatattccatgtaattttattctaagtgaggaagtaaaagaaatctttaaaatgtatagatgggaaggaaatgtaagagaattaagaaacttaggagaatacttctgttacttgggaaaagatattatagaaatatgtgatttacctgaatatatattggacactatagattcaaattatagtagaaccgtttgtaataaagtaagtgataatataaaaaagtatcaattcaacattggcaaagacaaaaacatcatgaaatacgactataattttaaaaggtcactagatgaatacatatttatattggataatttaaaaaaggcttatgatttaaaagaaagaataggtagaaaaagcttatgtaaaatagctttagaggaaaatagatttttgacagaacaacagattagaaatatgcttttagaactacaagactttgggcttgtagacatacttgttggtcgtggaggttcaattataacatcaaaaggagtagaatttctaaaaaatataaataggtctaacaagttaaacagttaaacctatttaacctatttaattacattttcatatatttaaaaatttattagaaataaccttttccacaaagttttaagtataattaatatttttatcttatctatgctctgaaattacttaatattaaatattaacttgtgaataaatattttttattatcaatattggcacgttgtttgcttaatattattaacataaaattaaaattactggaggtatttacaatgaattataattttaatgagattgttgatagaagcaataatttttcatctaaatggtcagaaatggaaaaaaagtatggaactaatgatttacttcctatgtgggtggctgacatggattttaaggctgcaccttgtataattgattccttaaaaaatagactagaacaagagatttatggctacacaacaagaccagattcttacaatgaatctatagtaaactggctagataggagacataactggaaaataaaaagtgagtggttaatttatagtccaggtgttatcccagctataagtcttttaataaatgaactcacaaaagcaaatgataaaataatgatacaagaaccagtttacagcccttttaatagtgttgtaaaaaataacaatagagaactaattataagcccattacagaaactagaaaatggaaactatataatggattatgaagacattgaaaacaagattaaagatgtaaaattattcatactttgtaatcctcataatccagttggtagagtatggacaaaagatgaattaaaaaaactaggagatatttgtcttaagcataatgtaaaaatcatatctgatgaaatacatagtgacattatattaaaaaaacataagcatattcctatggcatctatttctaaagaatttgaaaaaaatacaattacttgtatggctccaactaaaacttttaatatagctggtcttcaatcatcatatgtaatactacctgatgaaaaagactataaattgttagatgatgcttttaccagaattgatataaagagaaataattgctttagcttagttgcaactgaagcttcatataataatggtgaatcttggctagaatcatttttagaatatttagaatctaatatagattttgctataaaatatataaatgaaaatatgccaaaacttaaagttagaaaaccagaaggtacttatttattatgggtagactttagtgcacttggattaagtgatgaggaactagaaagtgtacttgtacaaaaaggtaaagttgctctaaatcaaggaaacagctttggcattggaggaagtgggtatcaaagaataaacttagcttgtccaagaagtatgcttgaagaagctcttataagaataaaaaatgcaattaaataaaaatatttaaggagaatttgcactatgaaaatgaatacagaaagaaaaataccttcatttagatattccttgttagtaatgcttgcaataatagctctaacatcagttggtatagttgtatttaatgcttctataactacaatgtttttactttcatggcttatagtagttcctgcagccacgaaacttggttatactaatgatgaaatagaagcttttggatttgaagttggtaaagatgcctttcaatcaaacttaattatactttctgttggtgtactaatagcagcttggatagctgctggtacaataccaacagtagtatatagtggactaacaataataacccctaaatattttctgcttacaacattaatcgtatgttcattaacttctgttgctactggtacatcttgggggactcttggaacttctggtatagcaatgatgagtattggtactagtatgggtattcctcttggtttaacagctggtgcagtcatttctggtgctttctttggagataagatgtcacctctatcagattctacaaacttagctgcagcagtttgtaagacagatgtaattacacatatgaagcatatgttttataccacaggacctgcatacgtaatatgtatagttctgtatacagtaattggatttaagtattcaaataatactatagactatgttcaaataaatcaaatcaaggatgtattaaattcaaactttcatattggtttagtagcaatgattccaataatatttttattattacttttattgctacaaaagccacccattatatctatactaagttcagctatcatgggacttattatagcagtatttcaagaaggagaaaaaataggtgatattttaaattacatgctatcaggatttactatagatactggatttgtctatgccgacaaactattaaatcgtggtggaataatgagtatggctgaaaccgttttactagtatttgtagttttcgttattgccggtattctccaaaaaactggattcttagaagtactgcttcaacctcttataactaaaataggaaaatcaagaactaaattggttgggtctacttttatagtaagctactttgcaaatgcatttagttcatcaatgatgtttacttctgtatttgtcggaactctaatgtctccaatatacaaagagtttaaattaaaaccacaaaatctatctagaattatagaagatacagctacacttggtggtccattaataccatggaattcaaatgctgttttctgtgctcagactcttggtgtaagcccactagaatttattccatattgtttcttaagttggattacacctataatttcatttatttatggtgtaactggttttactatgcttacatacacagatgatgaaattgaagagttagaaatatttgatactgctcagagaagagttgattgaatatgaaatttgaatactattacttaattcaggatattgcaggtatattattggcatttataggacttagaatgtctattattggatttaggatactttctatgaaggggatttctataaatacacttttaattgtaattaaatactgcttatttaccatagcaggactgaatttattaatatctaagtttggaattagacactggatttggagtgtttgtatgttgataatatccataataataaatcccaggattaaggtatcaaaatagaaatagttattagacttaaatttttataaaaaaactgctttacaaattaaagcagttttttattgttacttataattaaataactggtgtatcagataagtaatcattacttacataaccatatccaccattatactttatttttacccatccagtagcaaatatttctattgtttctactttgcttccatatgaaaggtgacctattttttcatcttctgtacttggtcctttcctaacatttagaccatctttttcttttacatactttatttttatattttcattactattatcaggcttattatttgtcaaataagacccactaacatatccaataccttcattgtattttatttttacccatccagtttttaacacatctaaaacttctacttcatcaccattatttagatatcctataacagaagcttctattgtagcatcatttcttatatttaccttatctgtattagttacatacattactctcttattgttactatttgcctgtaaatcttttaattctttaaatgcattttcatttcctccactaccaacttgagttatagaggtagcatttttattcaaaaatacactcttttgtgttgcacttaattgttctcctacgattagtacaggagaattttcttttgatgccagtactcctactgctagagcgtctataagttgattttgatttttcattccatccttagccacaaatacattgtttaatttattagatgtataaaacttttctattactttaccattagtttcatttctatctgctccacctattctttctgaattaggtaaactttgttttattttatctgatacagcattagtagagcctattatgtatgatttatttatattcttagattctataaaatctttaaagctagatataccagatgcatcagatactggaagtataaccattccattagtagcagctacagaagctatactaactgcatctgcaagacctgtgtacccatttactacagctatttctgatatatcttttaatccttctatttttttagctatactcaaagctgtttggtatctatcactaccaccaactctatcagtagttaaattattagattctaactgtttttgcacatcatttgatacagaactagatagaccaattatataaacttttttaactcctaatctttttaattctttctcagtttgtgaatttagattatttttttctgtcaataatataggagcattttttaatttagcaaatggtgttacagctaatgcatctacaatagattcactatttacaactacagcctcattcgcactactccatccttttttgcttacttcaacagcagtttggtatctgtcctgacctactaaagtattctccactgttgttctacttatttcatttgcatatgctactggtgataagcttaaaactagagctaagcatagcattgatgatattgatttagttaatttcatcttgactccccctaaaattatagtatctaaatgtttcctatttaaaatagtataacataataatttaagtaacatcattattataaaatattatttttctatctaataagcttttattcttacttgacattaatactttactcatcaaatgaattttttatataactaaagtttgtaacaacatttccttagttaatcatttaaagctactttttttaattagattatgtacaaaatataaataacaatttaaataactttttaatatattgtagttgattatataaactttatattataatgtataatgtggagttgattataaaattgatataactcaagtcatattaaaagaggtgtattttatactatggatttattgcatcttaagtattttcaaactgttgctagaatggagcacataacaaaagcatcacacaagttaaatatagcacagccagctttaagcaaaactatatcttccttagaaaaagaacttggagttcagttatttgacagaaaaggaagatatattgttttaaatgagtatggaagattgtttctaaaaagagtagatagcattttagatttagtagaaagttcaaaaaaggagttacaagacacttctttagaaaattcaggagaagtaaagatattatctcctgcagcggctaatgtgttaccatcacttttgagtaatttcagaaaactatatcccaatattacttttaatgtgtcacatactttgccatcatcttataaaaaaagtgattttgatttgtacatatcttcttcatttacaaagctaaactcagaaaatagcataactttaacatgcgaagaaatactattaggagtttcaataaaccatcctttatcattaaaggatgaagtatatctaagcgaagtttcagatgaaaactttatagttataacgaagggtgagaattatagagaggtaattgatatcctgtgcgaatcagctaatttcaaacccaaaatagcatttgagtctgattcaccatatacaatttatgctcttataaaatcacttcaaggagttggatttatatgtggaaaatcatggggattatctcaagaccctgagattaagttgttacatatcaaagatattgaatttaaaagatatttaaatctttcatggtttagcgaaaactatgaatctaaagctgtgttgttgttcaaaaactttcttatcaactattttaaaaatatttaaatcaaagttgataatattaaagaggatatatcaaaatataataaatttaatcttaatattgatacatcctctttttatcattttatattgaacttgtattatagtatagaattatatgttatagctactttttctgtctttcaaatagggtatatcttccctatacttttttatttcatctaaatcaatctctgataatacatatttttccctgtatgtatctaattgagttattacagtacctctaggattgcatattttactctttccaaatagtattaaattagagtcattacttactaaatttacacctactgtatatacagtgttctctaaagctctttgagatacatttaaatcccacatatcttcatcttgtattctccatgcagatggtataaatattatttcagaaccttttaatgtcaattctctggatacttctggaaaacctgcatcataacatatcattacaccaaatctaccaaaatcagcatcatatacctctactttttcccctcctttaaagtatactgcttctaatgaccacagatgatttttacagtattctcccataatcttaccttttctatcaaatataactgctgaattataaacatgtgtagaccctttttctaaggttccatatggagatatcaggtatacattatttcttttagcagcttctgacattgattcctctatgtacttattatgttctcttattaattctaatgttttaactccacctaaagactctaaattatatcctgtagcaaatagttctggtaaacaaattatatctgccccatgttttcctaagtcatctatcatctctactgctttttctatattttttttaacatctccaagtacactgtgttgttgaattatacctattttcaccttacgacccatgtaattgccccctttatttatctttgattccaaaacatttcattaatatataataaataaccatactcactacaattccatttatcggaggtattaagaaatttatttttgaactataatacgacgctgcaaaacctattaaccagcttattactgcaatccaatttattccttctctatgcttataagttcttccttgtataaaataatactcacaccacataattcctgctattgcaggaactgcgattcccaagaaagataaaaatgactgaaatttaaatattataccagtagctgctattattgtacctattagacctgcaactaaagtcaaaacatttctttttacatttggaaaaatagtttttaatgctaatccaccagaataagcatttgatacgtttgttgaccaagatgcaagtattaaaataacaaacgctacccatccaaaacctaaattagccaatacttctgttatatcccaagtaggtgctcccatagacattacaccagctgcaacttgttggaataatgaaataatccctagacctaaaaaactgataatccaaatatcttttactcgtctcgtatatcttaactggtcaggtgatataattgcaccaactataacaagacctactacaatattaagaccttcaaccatactcatagttgtttgaggagtataattataaatagcttcaactccataagtagaaaaagctttaaaaactccccacaccattaatatcataagtggtggtataactaagtaattaaatttagccatagctttaaagccatacagtgcaaaaacaaccataaataatccaagtataactgtaactaatgttaggtttacacttgggaatatcttttgtactgatagtcctgcaacccctgcttgtacaccaaaccatccaaaactagttataccaagtaatagagatataagatactttcctcctatctctccaaatgcccccttagctaatacatacgtatttaacccttctttgtaacctatataaccttgtatcataatgattgcaactaatattaagttccctataattgatgtaataatcatattagaaagagtcattcctaaaattaaagttcctccaaccattagttcagatatagctatgttagaaccaagcatattaaacaatggagctaaccatccaactctttcctcttttggaactggatttaaaactaattcttctctctcttgcaatattatccctccctttctttataaaagaataatttctacttttttctacttttttttcactattaatagaatttttctttatataattgtaattctattctacaaaaaagtataatatctagtttgttatcaatttgatataatttaagttataaatagataaatagtccaaatttattattttaatttaatctattaagtcatatattagacttatttcaaatttgttatatattctttaattaaaatcgtgtactcattacagaagtaatttctaaaacaatcaagtttatgtaaaatttttaaacatagtattttaattatattggctgagaatacaaggataatttatgaaaatatatagagaaaaaatataaaataattctaataaaaaaagtctgaatataaatatactttatatccagactttttacattttagtttcttgcaactacatattattcattatcttttatatcaacttttatacttaattcttctaattgctcatcttccgccaatgtaggagcatttgtcatagggcaaacagcattttgatttttagggaatgcaataacttctcttatattatcagttcctgcaagtaacataacaagtctatcaagaccaaaagctagaccagcatgaggaggagtaccatatttaaatgcttctaataaataaccaaacttttcattagctctttcctctgtgaaaccaagtgctttaaacattcttgattgaatatcagaatttgatattctaacacttcctccacctatttcataaccattcaatacaatatcataagctttcgctcttaaagatgacttatcaccttcttctaacttgtctaaatcttcatccataggtgatgtaaatgggtgatgcattgctgaaaatgtgcctgtttcttcatcttcttcaaaaactgggaactcagttacccatagtaagttatatacatttttatccaatagattaagcctatttgctacttcaagtctaacttgtcctaaagcatcaaatactattgagtttttatcagctacaaataaaagtaaatctcctacttcagcattcatttttgtaagtatagcgttcatttcttcttcattaaagaattttgctattggagaagttactccttcttgtcctactttcatccaagcaagaccttttgctctatatgtcttagcatgttcttctagtgatgatatttgttttctagtaaagtcgtcagctttgccttttacgtttatacctctaacactttttcctggttgtgtagcatcagcaaacactttaaatccacagttacaaacaacatcagatatatctgttaactcatatccaaatctagtatctggtttatctgaaccatatttagacatagcttctgcataagtcatcttaggaagtggaagtgccaattctacatctaaaacttctttaaatatcgcttcaagcaaaccttcaatcatactcataacatcttcttgctcgacaaaagacatttcacagtctatttgtgtaaactctggttgtctatctgctcttaaatcttcatctctaaagcatttaactatttggaaatacctatccataccacttaccatcaataattgtttatataattgtggtgattgtggtaatgcgtaaaattttcctggattaactctacttggtactagataatctcttgctccttctggtgttggagctattaaaaatggtgtttctatttcgcaaaatctattgtttgataagtaatttcttgtaatattcattactttatgtcttaattttaaatttctttgcatagatggttttcttaaatctaagtatctatattttaatcttagtgcttcagaaacatcatcatcatcttttatataaataggcggagtttctgacttgtttaaaagtctaagttcagttgcaaatatttctatatcaccagttggcatattagggtttttagattgtctttcgcatacttttccttttacagctattacaaattcagcccctaatttttcagctttttcaaaagcttctttatctacatctgtatcaaaaactatttgacataatccacttgtatctcttaaatcaacaaatacaagaccacctaaatttctttttttctgtacccatcccataagtacgacttcttcatttatgtttttttctctcaactctccacagtagtgagttctctttaaaccctttaaagtttccaagatactacctccattttatttaattttaatgctatatatttatctaatacacaaaacatcatactttcttattttacagcttttgctttaattcttcaactaatgtacttaattttacagtagtttgctctgatgttttcatattttttaatgtcgcagtgtcatttttaagctcatcatctccaatcactattgtaaattttgaatttattttatctgaatatttaaattgtgctttaacacttctctctatatggtctttatctgcacttatatgattttgtctcaagtcttttaataatttaaagcttcttgtatttgcttcttcacctatagttactataaatatatccgtagattgagggttttctatttcaattccattaccttcaagtgtaagtaaaagtctttcaattcctagtccaaacccaattccacttataccttttggtcctcctaattgttcaacaagaccatcatatcttcctccaccacatacagtactttgagctcctatatcattagatataatttcaaaagcagtttttctatagtaatctaagcctctaactattgttttatcaattacaaagtttatattcatttcctttaagtattcttgaagtttatcaaagtgagatttacaatcatcacacaaatggtctgcaataaatggtatatctttgatattttctttacatgtaggatttttacagtctataaccctcattggatttttttctcttctctcattgcaagtatcacacaatatatcagcttttgagtcaagatactcttttaataaagcattgtactcttttctacaaactggacagccaactgaatttatactcactaccaaatcatttaatccaacttcattaaaaaattgaacagctagtgcgattatttcagcatccattgaaggagtatcacttccaagtgcttctattccaaattggtgaaattgtctttgtctaccagcttgtggtctttcatatctaaaacaaggtgtcacataaaataattttgttggttgagtatctgcatataatttattttctataaatgctcttactacacctgctgtaccttctggctttaaggtaatttctctatcacctttatctttaaaagaatacatttctttttgaactatatctgtagtatctccaacacttctcttgaaaagttctgtatgttcaaatataggtgttaccatttcttcatatccatataaagcacatatttctctaaatttattttctacataacgccatttgtaagcctcttttggagttatgtctttagttcctctaggagctttagtcaacatttttatatacctcttctttcttcctttttatcatttcatctactctttcaatgtattgttcaacattttttacattttctactctttcaattctatcttcatctacataaacaaatttcgatatagcacctgcacctaatgcatagttactttgtttttcttccataatctgtatattataaatgcactcatatccttctttagcataacctatattttctaaatttcccaacatatgtttttgtctgtacatataatatggatttaatcccatatcttttgcatatttcattgataaatctatcatttttaccatttcttcatattgtgttagatgttctttatacctatccatatttatatttaagttggatgctctctttatggctaatgtatgaactgtaaggctttcaggagaaagtttttttatctcctccaatgtgttctttaccatatttaattcttcatctataagacctaaaattatatccatatttatattatcaaatcccattctacgagccatattaaagcaatctactaaatcagatactctatgctctcttccaatctttaccaaggtatcatcattcatagtttgaggatttatactaattctactaacattgtgtttttttaacactcttagtttttgttctgtaatagtgtcaggtctacctgcttctacagtaaattctttaattttacttaaatctaattcattgaacaatgaatttataagcaaatctaattcttcctcatcaagtgtagttggagttccaccaccaatatatagagtttcaacttctttcttagtctccttaataactttggcaaaccccttaatttcttcaatcaatttataaacatattctctttttaaatgtccaaattgttttaatgaatttgaaggaaatgaacaatatacacatctagttggacaaaatggaatacttacataaagagaaattttatttttatctataggatacataaataatcgctctcttttagctatttcaagagctaaatctattttcttatctattataaaataattatcttttagaatggttcttatgctattatcatctagctttttatccattaaattgtggacaattttgactggtctaataccagtcaaaattccccatggtacataagaattaaatacttgtttaagcactacaaacatgctttttttgatattttctttacacagctttttaaagttcctcttactttcactatctagtctattaagaaattcttcaatcgttttgctactatcaaatccatctaaaaattcaagattcatattttctatattctgtattgactcgtactttaaatttccattttcatagtattcagtacttgagaataatacaccattctcataaatcaatctatttattaaatgctttgactctatattattgttagcattagagtctttaaacttaaattcactggtaaacaattttataagttctgctacttcatacttataatcatgtccttttaaaaaaacatacaacatcaacttaactccttctatttaacagtagaagaaccccctcactaatatagttattaaatattttatacttttttaaatactaatataaaattacatgtaaggatttgtcttcttttcaacccctagagtactggttggtccatgtccaggatatactctaacagcatcttcatatttgcataatttcttaagtgatttttccatttggttaaagtctccactatataaatcagttctaccaatacttccagcaaacaaagtatctcctgtgaacatttcatcttcaactcttatacacatacatccttgagtatgtcctggagtatgcaagaaagtcatttttaattcaccaagttcaagcttgtctttatcactcacatagatatctgcatcaaactcttgcgctccacatctcattgtataacttagatttttatttttatcatttaataattctttttcatcaacatgtgcaactactttagcaccagttttttctttaatatccttaacatatcctatatggtctccatgcccatgagtaaggataatatattcaatatttaattcattttcttttacaaaacttaatgtctctactaaacttccacctgggtctataactgcacattttttagtcttttcatcacctaatacataagtatttactccaaaataactatctacaaatttttttataatcattaaagttttcccccttaaaaagatttacttgagtctaatagtattgttactggaccatcattagttaactctaccatcatatgagctgcaaattgacctgtaccaactgtcacacctttatcttttgctttttttacaaattcttcataaaggttatttgcaagttctggtctagatgcattactaaatccaggtcttcttccttttctgcaatctccatataaagtaaattgagatactactaaaagctctccacctatatccattagagataaattcatcttgtcattttcatcttcaaaaattctcagattcaatattttatcaatcatataatctacatcacttgatttatcatcatgagtcactcctaacaatactagtaaccccttatttatttgacctatagtgttttcatctactgtaactttagatgaagatactctttgcactactgctctcatagtttcctccctattattttaactctaatttgtcattctataaatactttctacaccaggaattgcttttaattttttcattagaatttttaattcctctgtgtcattaacctctacaagtaagtttatacttacaatactatccttaccttttcttgcatttattccgtttaaactaagtttatccattgcaacaatatgagttatttcattaacaattcctcttctgtcaatagcttttatttgaatttccgcttcaaacttaccttttcctgctgaactccatgaaacctccaccaatctattttggaagaaatcaccattattgtttgcatttgggcaatcagctctgtgtatggctactcccctacccttagtaatatatcctacaatttcatctcctggaagaggattacaacacttagcaaatcttactaagatattgtcaagcccttttactataattccttgtgatgcgtttttctttctctttttactgtattctgtttcacttatattgtgtttatttaaatcttcttcttgtatctgttgttcctttttagcttttttaacctcttttaaatataggtcttttaccttagataccacttgagatgacattataccgccataacctacagtggcaattaagtcctcaacacttggctgattaaatttcttagcaactaatgccatatatttttcaacaagagggtctttttgtggtatatcatgcttcttaaattctctttctaatattgtatttccacggtcaacattttcttctcttctttccttcttgaaaaattgtctaattctactttttgcatttggggtcttcactatattaagccaatccctacttggtccattagaattagatgatgtaagtacctcgacaatattaccattttgaagcttataatcaataggaactattcttccatcaattttagctcctacacatttattacctacatttgtatgaactctataggcaaaatctataggtgttgattctgctggtaattcaattacgtctccttttggcgtaaatacataaacttgactattaaatacatcttctttaagtgcatccataaactcttgtgggtcttttaaatctttttcccactccatcatctgtctcaaccattgaagtttttcttcaacctttgactctttgctagagataccttctttatatttccaatgggctgctataccattttcagctatattatgcatctcatgagttcttatttgtatctctaaaggttctccatcaggacctacaacagtggtgtgtaatgattgatacatattgggttttggcattgctatataatctttaaatcttcctggaataggtctccataatgtatgaactataccaagtactgcatagcaatcctttacattatcaaccaatatccttactgctgttaaatcaaaaatctcttcaaaagtcttatgttttttttgcatctttctatatatactgtaaaaatgctttggtctaccatatacatcacatggtatacttaaatctttaaacttatctttaagaagttcaacaattccttgaatataatcctctctttgacttctcttcattgatactctactaactaaatcataatacccttctgggtccataaatcttaatgctctgtcttctagttcccactttatcttggaaattcctaatctatgagctataccaccataaatttcaagtgtctcttttgctttatactttgctttttctggaggcatgtattttaatgttctcatgttgtgcaatctatcagcaagttttataagtataacccttatatccttcgccattgccaaaaacatttttcttaaattttcagattgagtttcttctttcgaacgatattttatttgaccaagtttagttactccatcaaccaaatccgctacttctttgccaaattctttttttatgtcttcataggtatattctgtatcttctacaacatcatgaagtaaacctgctgttatagtttcaatatctaattccatctctattaaaatatttgcaactgctaatggatgaataaagtatggttccccagattttctatattgtccttcatgcgctttttttgcaagattataggctttttcaaccatttcaaaatttgcattaggtgcataaacttttattttttcaattatttcttgtaattctttatcatgcatataaccacctattttgtataaaattttaatatatatgaaaatagttggtgttataccaactattataaaagtactagtattttataagagaattaacatcatagttagacaacttttctctcccatttaagaattttagctcaatcaaaaattgcatagaaactacttctccacctaatttttctacaagcttggcagcggcttccatagtcccaccagtagccaataaatcatctactattgctactttttgaccctttttaattgcatccttatgtatctctaaagtatctgtaccatactctaatccatactcataactctcaacttcacctggtaactttccaggttttctaattggaacaaatcctactcctaaagcatatgctacaggtgtacccatcaaaaatcctcttgcttctggccctattactaaatctacatctttatctttcaattcttcaactatagaatccactgcatatttaaatgcatctccatctttaaatagagttgtcacatctttaaaatctatgcctggttttgggaaatcatcaatattccttataaagttttttaaatccatgggaaacgcctcctaataactgctattgtattgtttttctaaattttttagattattgagtattaaactctcatttaagtctaattttttctgtggttttggcaatattcttatgagtacagaatttttttcataatttaaattaaagtcaagtaaatttaattctctaaatacatttaatatcgtaaaaaactttaatggaattacattaaaagtttcccttatatttaccatatccaaatcaatttctttttttataagtgcttgtttataaattgttataaattcatctcttgatggaactatattactaactacattctttaaatataataggtctgttttattataatattttataatttcactttcttctcttttattctcatatatatacgaatattcgcctttattgtataaataatcataaagaataatattattatatctttttaagtctattttatcaatattaggagaaaatataagctctaatttatcagtatttttgctaacatcttcaataatattgtaatttatgttaaaatccaaatctataagtgatatatctgacattgctctataaaatccatttatagaattagatattattagtgtatctttttcaaaataatcaaatatatttatatctgtatttccatcaaataattcaaaatcagacacagatatattatacaggctttgagtatcttttggtattatttttgacattaatttcaatgaaagtttgtcattacttgcacttttaggtcgagccaatcgtatatctttaagtaaaaattgtactttcctatttcccatatagttattttcatctaattggaatagtacatctactttgtctcctactttatacattgattttaaatgactcatattaaatcctatacattcatagcttttctctttttctatacttaatttcagatgttgttgattcttacctataactttcaaatcttttaaaatataatttctaactataaatctaggattaggattatttaatccaaagggttctaacttatgtaattcttctacaagatttaaatttattacattttcttgtaattcaaactcgacatttacattctctatcatatcatcttcagttaaattataatctgcaaatttatttatttcatttgctaaaatttctacattgtctgaatccaaggataaccctgctgcttgttcatgaccaccaaacttagtcatcaagtctttgcactttatgagagcttcaaatatattaaatccttttattgacctcgctgaaccagtagcctccccattttctatacctagaagaattgttggtttgtagtatttttcagttaactttgatgctacaattcctattattccatgttgccaaccctctttggctaaaaccaacactttgtcatcattgtatctgctattagactttagcatttcttcagcttcatgatacatcttagcttctatcatctgtctttcattatttttttcttccaatatactagctatttctactgcctcttcttgtgactgagtagtaaatagctctactcctaagtaagaatatcccaatcgacctgaagcatttatcctaggacctattgcaaaacctatatgagaagaacctatcttatcactttctacaccacaaacttttataagctcccttaatccaatatttttgccttctttcattgattttaaaccattttttacaattattctattttcatctataagtggaacaatatcacaaatagttgctagtgttactatttccaaataattatacatactagttttaaattcttcttttggagtcaaggcttgaatcattttaaatgctacaccacatccacatagtgaatcaaatggataattacaatcttcttgttttggatttattactgcaaaggctgatggaatttcactttgacattcatgatggtctgtaattataacatctatgcccaaatcattcgctgtattgacctcagacactgatgtaattccacagtcaacacttataatcaagtcacatcccctagagcttataagcttaatagcatcctcatttataccatacccttcttctaatctattaggaatatagtaatcaacattgtaacctatactcttaaaatataaacacaagatggatgtagatgatacaccatcaacatcataatctccgtaaatccaaattttttcgttcttctcaactgctaactttattctatcaacagctttttgcatatctttcattaaaaaagggtctcttaaataatctaaagatggattcataaatatttctgaatctttttcagtacatatccctctattttttaaaatttggcagatttccggggaaatattaagttttttgctaaattcactttcctctatcttacctttatacttcaatatccattttttcaaatttaattccccctaatcttttttgtattttgacctaatacttcttataactaagcaaaggcctattataaaggatataaagaaacccgctattgcagtaaattttatccatatattattttctatatttggagatgcaattataagagaagaacctactataatagatgccaacactaaactcaaagatatttgagatgttagctctattatacaattttctaacctcgtcattttaacatcttcaatttgcatttttatattatttctttctatattttttaaaattgcttttaattgctttggaatagtttttatgtccagtaatatttcttctacattttgtcttgaacttaaaacaacatttttagggttaaatttactcttataatgatgtttcataaactcttttcccatagaaccaaaagaaaaatctgtgtttaaagttctacttgttccttctaatgttataactgtctttgcaagagttacaaattgtgcaggcatgactattttatactgtctaaaaaacctaaatagttcatttaatatatctgttacatttattttttctatagaaatatcatagtaataatgtattagataaagtaaatcctgtctaagtcccttaatatcagcctctccatttaatgcatccatttctatcaatagatatattatcttgtcaacattcttttctacacctgctaatgcaatttcatttaattggtttaaagttttattatcaataattccaatcattccaaaatctatatatgctatcttatttttagcaactacaaatatattacctggatgtgggtctgcatgaaaaaatccatgagataatacctgtgtaaaaaatgacctaactcctatttcaacaatagtttttgtgttataacctagtctccttattttttctacatcacttaactttgtaccattaactttctccattactaaaattttcttagtattatattctgagtatactttaggtatatatacttcatcactatttttaaatatcctagagaatttagttgcatttatggcttcaaatgtataatcaagttccctcattaattgagtttgaaattcttcaatcatctgtactaaatctaaattaaaatccttttttaaatcttttaaagtatttgcaatagttctaagaatctctaaatcagattttattattttctctatatttggtctttgaatttttacgattacttcttctcccgttttaagtacaccttcataaacttgaccaattgaagctgctgctattggttcttctttaaattctaagaatatttcttctatacttaaacccacttcttctttaaatatatcaatagctatatttgaatcaaatttctctacatcatctctgagttttgatatttcatcaattatatcctggtctaacaagtcttttcttgtactcaatatctgtcctatttttatatatgtaggtcctagttcttctaaaactcttttcattctctcaccagttgtcatattttttatttcttctggtgggtcaaatagtggtattttataggcaattccttctatatttagtctttctacaataaaactaaaaccatactttattaaaacatatccaatttctctatatcgctttaaatttctataacttattctcaaatcttttcactcctaagataggtatacccaaaaacttacaccttaatttatcgtatatgacattatttcaccaattgatattctaatatcctatatcctctttaatatttaattttatcacatatactaccaattttattaaaattatttaactcagttaatttttatttttgacattttatatctggtttaatcaaatactttttgaaaactaaaatatcaacaaaatctaataaaataaattagtggttgcctcaaaacagatttaaatatgttttgaaacaaccactctttaaactaatatttttgattttgtgctgcctctaaataccattcataagattcatcaatatattttttatcttcttctgtaagctctctaacaaccttaccaggagaacccattatcaaaacacctggtggaaacttcttattagatgtaattagtgtacctgctcctatcagagtatattctcctatttcagcattatccaatattattgaacccataccaattaacacattatcactaattttacaaccatgaactatagacctatgcccaactgttacattgttaccaattatagtttctgtatctccatgcactatagaacaatcttgtatattagtgttttctccaatagttattggtccttcatcacccctaactactgcattgtaccatatacttgaatctttgcctattttaacatttccaattacatctgctgattttgccacaaatacactttcgtcaattaaaggtttatcttctaaataatctctaatcatatataaacaactcctttaaaatataaatttagttggttgctccttctaacattaacttagcttgtatcattatagagcactctgtacgttttctttgcatttcacatcctaattcatatggttttgatatgtcattattaaagtttatcgcatttgcatgacatccacctgaacagtaaaacttattccaacattgtttacactcttctttagtatatacatgagcttctctaaacatattttttaaattttctggaagtactatttcttcatcaaatatatttgccattttaaattcttcatttccaacaaattgatgacatggatagatatctccatttggagttacagaaagatactcatttccagctccacatccagttattctctttattacacatggaccttgatttaggtctatcataaaatggaaaaatttaaatccatctccttgtaattgtctatctgcatactctacagcaaatttttcgtactcttcaaatatcttaggtaaatcttcttctctaagtgcatatggattactctcatctccaacgactggctctacagaggttaatttaaatcctaaatctgcaaaatgcataacatcttttgaaaaatctaaattatctcttgtaaaagtacctcttatataataatacttatcttttgctcttttttccacaagtttcttaaatcgtggtaatgtaatatcataacttcctttatcatttaaagttggtctcatattatcattaacttcttttcttccatctaaacttaaaactacattatgcatattttcatttatataatctataatctcatcatttaacagtacaccatttgtagttattgtaaatcttatatttttattataatctttttctacacttcttccatagtcaaccagttgttttacaacttcaaagttcatcaaaggctctccaccaaagaaatctatctctaggttctttctacttcctgaattagcaatcaaatagtcaattgctgccttaccaacttcaaaactcataagttctttttctcctccaaaatcaccttgagctgcaaaacagtatttacattttaagttacaatcatgagctacatttaaacataaagcttttactacaggctctctatgtacaaagcttggatgatattgatatgtatcttctgtgtataaaagaccttctttttccaaatttaatatttcttcatatgcttcatttattttttcttcttgatattttgattttaatatctctaatatttcttctttacttttttctttataaaaatctaacaaatcgtatgcaacatcatctaacacatgaacagctccaccattcacatctaaaacgatattatatccattcatagaaaatttatgtatcatactcataccctacctcctaaattactatctatactaaagttttttattattttaattaaactttacccttcattatatcataagtttacataaaatacatacaatacaaaaatgacttactctccgtaagtcatttcattaaatacactatatccccctaaattggcgcactaatatattaccaaataggtattaggctcctataaaataaataaaataaattttgtatctgattttatattgttttaatcttattaaaatataataatttcttttttcctgataattttgtataaataagtgcttgtatttaatttgtcttctttagattgctgatttctttgggtactttaggctgatgaataatccaaggacaggtactattagctgacaaaatagcagtgctaagtgccaatgagctagcaaacttcataaatcttacaataaactttttcataacttaactctccctcatacatattttacttatactttagcttttaacttacctaatactaacatcacaaaaatccaaaacatggcaaatgcgctatatgtgaaataatctacaaatatactcaaagaaagacttaaaattgttatcaataacactactgtagatataaatatagcagttttcttataaacaaacttttccctatcacttatagggttactcctatgttctattggacacagaacacaaattccaacccaactaacacttgcaataatcataataatatttttaaataagtctatatttatattttctataattaagattgtagataaaattataaaaataaaggttaataagcatctaaaataattgtctgcatgataccctcctgaaaattgtcttattggacaataacacattaaaaaaaataatacatatgtaaatttaccaaataaaaaacctataaacagcatggtggttatattaactatgaaagctattaatatttcaaatccataagaatagactttagattcattattatctatcatattattacaaattaaaacagatgtcattttttcagcatatcttttaaacatttttacctccaaaaaaattttacatatatagagtacattcttttttgagaaaattcaatatactttacaaaactagttgttaaaaatgcaaaactggtcaaaaaaagacctatataattttcttattattatttatataacaaaacaattataataaaacaattttatcaagctttatatgcataaaaagcctatgtcaaaatagaaataaaccttttccccattgttaaaaggctaaaaatatattttatttcatataaaaagagtacctcacaaactaaaaagttcattttgagatacccattttatttattacaaaatatcaaattttatttatttgcatatattttctatatattttagccttttaactttgtttttgttttacatactgtagtgcttttctattctgttttactgcttcaagacaaactttttctgtttgattatcaacaaattctaaagctctataattttgctttactgcttctaaacatattttttctgtttgattatttacatatttcaacattctataatcttgttttactgcttttagacaaacttcttctgtttgttctttcacatatttaagcgcttcataactttgattaactgcttctaaacaaatctcttctgtttgttcctttacataagctaaagcattatagttttctcttactgcctctaaacatattaattctgtctgattttctacatatttaagaatttttccattttgctttactgcttctacaaatattctttctgttggtatctttacataacttaatatttcttttatttcaagttcttcaaatgaacctcttactgcttctatacatatattttcagtctgtttttttacatattgcaatacttttccattttgtctaactgactccaagcaaatttcttctgtttgctcttttacgtactgtaatgctcttccatcaattcttactgcttccaaacaaatctcttctgtttgcttatttacatactgtagagccatataacttctttttactgcttccatacatattttttctgtctgttcatttacataatacaatgcaaagtcattctgttttactgcttctatacatatttcttctgtttgctcttttacacaagatagtgcactgtagttttcttttacagcttctaaacatatactattactttgttcctttacataagctaaagattttccatctttttttacagcttctaaacatatggctggagtttgctcttttattccttttaatatctctgcaacatcatttttagatgccctttctataaatgctagacatacatcttctgtttgatcttccacaaatttaaatacttccatgacatcataagttgatgcattttttatagcctcaattagtacattttctgtcttattatttatgtagtacaaagctctgtagttctgttttactgcttctatacaaatatcctcattttgatttgttatatacttaagagctttatatgtctgttttactgcttccatacatactttataagtcttgtcctttacaaactcaattatagtaccatcctgctttactgctagcagacacatctcttctgtttggttttctatgtcttttaactctctgtaatcatattttactctgcttaaatcatttaaatgtactttgttatcttcctttaaatcttcttcattattttctatatcatactcaaattcttcatcatctaaatagtcatttttttctggtaaaaatatagatttaattttattctttatatccataaaattatcctcctttaatatgattctatcattaaagtaaatcgtttttaagcacttatttaattaattttatattaagtttatttaaaagtctattcattgtcgatagattatattttatattaataattttatcttatatatgtggggtaataaagttaatagtggacattttccatcccattagtatacactatttatatttattactcatttatagtgatttttttcaaattttttcttatttactatatcatatttatccaatttatgatattatttaaatataatataagttttataaagtatattaaatatattataagatggaggtcgagtaattttgaaaggaaacatagtacaatataattttgcagatatagaggaagaagtatattcgttggattatgctatagcatggaatacagatgaggaaaacgtaaacataataccatttacaaataaattctgtaaagaatctatagaatctttttgcctaggtaaaattaataactttgttgaaatattaaatgaaggttttgttgaaaatcatcattatgtacatttagataaaatgattagtgttcctaagaaaaaggttaatttagtatatcaacaagacacacatggttatcttctaagagatgataatgacaaccttattcctgcaaaaataacttcagagcaatctaaatctatatcaagtaagatggagttattctgtgctggtgaagaaaaatgtttaattaatatattactaaaggctgacccatcatatattttagatgtagatagtataaaagacaaaaacattctaaatctaggttatgagtctattgacagatataaagaatacaattttgatgatgataagattttaatattttttataaataaaaaacgttattcagtgattatgaaaaaaacaaacaactctgataacgatttagtttccagaaacaatgctattaaagaattatttactaataaagcaggaaatcttaactaatattataattttaaattatattattaattaaattaataatagtatacaaagaggctgtctcaaaatagagataagcttctttttcattgttgaaataataaaatatatttaattctatataaaagagagtgcctcataaactaaaaagttcattttgagacaccctcctatttataataaacaaataaatccttaaacctatcgagtgattataatttttagattgggttatcttgcatttttaaatttaaggtaactttctactctaaactttaatctctaatcaatatcatcaactgtaacaacttacaattaaatctttaataatcaaactttagactatctatattaaaactcaaattagatttaggatttatttggatatcacatttattttattaactagtaatcaattatttttacttataaacttattcttccctaattctattattaaatacttttaattatttttcaataccatatttttttaatttttactattaaatcacaaaatattatcttactccatcacaactacttttgatatcatttgagaatgaatcttcattttaatagtacttttattgataataacatccatatatactatagtcacaatgcagttttgctttttcacaaaatgactattacaaagattaagtaattcttagtaatcttttataaaaaagagatgcttcaaatttttattttgaaacatctcctttttaattcgtaaaatataattttgttatttagaaaaatgaattttagtaactatataacattaattatatattaaaagtcttttctatatagctttttatttcttcagcagtacccatattaagtacatcatcagctaattttttcatatctgactctttaactgaagttattaactttctagcaggaagtattgatattggagacatagagaactcgtctaatcccatacctaaaagtattggtatcattttttggtctccggcagattctccacacatacctgcccattttccttctttatgtgcattgtctataacagtctttataagtcttaaaacagctggattaaattgattgtaaagataacttatcttttgattcattctatcaactgcacaagtgtattgaattaaatcattagttcctatagagaagaaatctacgtgtttagccaatacatcagatattacagcagcagatggaacttctatcatcataccaatttctacatctttagcataagccacaccttcagaatcaagttctgctaaaacttcttttacaacttctttagcttgtaacaattcttctaaagatgaaatcattgggaacatgattcttaatcttccatgaatactagctctatataaagctctcaattgagtcttaaatatatcttttctatctaggcaaagtcttattgctctgtaacctaagaatggattcatttcaggttccatacttaaataacttaattctttatctccacctatatccaatgttcttataactatcggctttccatccattccttctaatacagctttgtatgcttcatattgtatttcttctgttgggaaagaatctctatccatgtataaaaattctgttctataaagaccaacaccttcagcatcattctttattagaccttctatatcgttaggtgttcctatgttaccagctaattccacatgttttccatctaaagttacagatggttttccttttaatagctgtaatgcttttctctcatcttcatacttagcttttaattcagtatatttatttatagtctcttcatcaggattcacaattacttcacctgtgtctccattgaaaactacaaaatctccatccttaacttttgaagttatatcatttaatccaacgattgcagctatttctaaagttctagacatgatagcagtatgagaagttcttccacctatatcagttaaaaatcctaaaaccatttttttattcatagttgctgtgtctgatggagttaaatcatgtgctattaatacaacttcttcgcttaaagcagataaatcaacaactttaattcctaatatatgtctaagtattctatttgtaacatcttttatatctgccgctctttctttcatgtactcattgtccatagactcaaacatgctaacaaacatctcttttatttcatttaaagcatactctgcatttacactttcagttttaattttatctattgcagaaccaattaactctgggtcttctaaaactaataaatgtgcttcaaatatttctgcttcctctgctcctaattcttcagaagccttttccttaacttttactaattcttctttagaaactgcaactgcatcttctaatttagcaatttcagcttcaacattatctatagattttttttcaattactaattcactatgttcaactactaacgctttccctaaagcaacaccaggagaagcacctattcctttgtaagccataaccctacctcctaaaaaatatcatctagcacataaactctataaatttatataaataatttacatttttatagttttatttacttataattttttattaaattttataaactgtttgttactgtatttttactctgaatttatgattaaaaatatcttatttcattttctaaaatatttatatttttatacccaattaacaatagtcttaatcttctgattaaataaacatgaaagtaacaaagaaattaaatatctacaaatgttggtctgtatatgtttaatacttctctgttactttactttaagtaatattagattctaaatatcaaattttaaaaaattattatatctattctccaaatccactttcaactaattcaaccattgcagctaaagctacttcttcatcttctccatttacaactaactttaattcttctccttgagctaaacctaaactcattattcccattattgattttgcatttacagttttgtcttttgctacaacctctactgttgatttaaattcagctgccttcttaacaaacattcctgctggtctagcatgtaatccacttgcatttttgatactaactactttttccattttttaaatcctcctataaactttacattttatattttttaaaattgttttcctgttttttactttaatggtactaagtggtacttttttgtcctatggtcattttttgttcccactagtgctacaaaaatattatactactaatatacacttttttcgagtataattacaaatttttttttgttttttatttaactttgattttttatgtcttttataatacaatttgtcaataattttgtgtttttgttctttttaatactaattttaggtctaacttcaaaattagaagctaaatttctattagaatcaatatttgtatttacaacatctataaccttgttaaaatcatataattttatcctgtttatattattttcttcaagtttcttttcatatatacagtaaaacaaatctttatatgaaaagtcctttggcaatccaagcacctcaccaagctttggtattacactttccataacagttctaagtgaagcatctctttttatattcaataaattacagatatattgtattgtttcattgctcatacttctaaatttatcaaaacaatattcttcattatatttatactctacatcaaaataatacttaattccagtgcatctttcatatgctttcatagtatctaagtaacctagtcggatgtttttttctacattatctctatctttattaagagaacctcctagatattctgatggtattatagtttttatatttatattttgatgtcgatttagattcattttcccaataaaatcatcaatcaacctaattacaacaacatcttcataacctttgtcttccaagagtcctattggcatgttatcacaaaacattccatcaagatacaacttatcatccatcatgttcgtttgaaaaataggcaaactggaactagcaattaaataatcaatcaatcttcctttaggtatatcttcgatatacaatggatatggattaatttttttatcccaccagaccgtaacaagtccaaagtctttttttgatttccttattatgtcttcatttaatgttgtctccattagttgtcttaatgggcttatatctataccttcattttttctagctttatttataagctcaaacactgcattgagatttttagtagtgaaatctacatttttaaacctctcataggtttctctatcaatattcataaaatgagtatagtcataatttaaccaaatatcttccattacttcaatatcattttgaattatatatgctccatttaaagcaccaattgatgtgccagttactccttgaaactctataccaagctctcttaaagctttatatgcacctatttggtaggctccttttgttcctccaccttctaaaactaatcctttcatattatcacctactatatcaaaaacgtttctgatttttattcttaagcaaatattaattcaaaaaactatttttagttattggagaaaaataaaattgcacaaattcattcttattttatcaaaaaaatattgaaaagtatatatttttaatattttttatatggctaactttttatttctaaatttaaataaacaattaaaggattataattttttaatacttacaactgcttatatacctaaagaatccattatcaagttatccatttttatctgcaatttttctacttttcctttatctatagacttatttaataaaattgatattatttgctttgataaattctctatctcttcataattattatccctaaaaatccttatcttcataaccttattaggatagtaatcatatatatttttactcatttttttagcagttattttaaagtatttatcataaacactggaatttaaaattccaactagatattcatatgaaaatttatctaaatactcttcttttataaaaaaagaatatacatctgcacttgaaaaattgttatcataatctatagcaaatctattttcatttgatttataaggatacattatcttttttctttcaaagaaaagcttttctctaccccattgaagttcataccatttccttattccacttttacattctcttctgttttctaattttgttttatatagccctataatttcatctagtatctttttatttgtattctcattatctatatcatttgagtatattagcctatattcacttttatctactatatatttatttatattcttactttttatccaacattttaaaaatttatcatctacaaggttcaactttacatcatctttacttaaaataaacgctttatcacaccctgtaattattccttgaaaacttattgctatatcttccaagctatatttacatttttcttgtatcttattataaaaagtttcatcatctttatttacaagtatccattcgtcagatagcaatctctgatttatattaaaatgttcaaatttgctactctttagaagttcttccaatgtttcaaatttatttatacatatatcctcatttttgattttaaatacatctatatatgtctcttttgtttttttcttatcaaaagttagaatacaactagatacccctatgtttttaaatatatttgcacctaaaaaatccactatttcttgaacattgacatttgatttaatatattctcttaaatctttacctgatagactttctaagaaatatcttggagttataacactgccaacccctccttgctttaaaatatctataatttttttataaaaacaaaaatataagtcagctttatccttataaacttcactatatttttctaggagaaattttttatatttcttttcaagttttttatgaccaatatagggtggattacccactatgtaatcaaacttatatcgccatttctttttaagactatcacaacaaaatagattaatctttatatcagattcatctaaatcatttactacctttttatttgttaagctatcttttaatatacttatagctttttcatcaatatcagcaccatatatacaatagtttaatatatgacggtgtatgttatcaacagtccaataattttcatcatacttctttttcaattcatatatattttcctcaaataagtcatataaaatatcatatacttctaaaagaaaatttccacacccacaggaaatatcaagtattcgtggatatggatttttaattatatcgtgattttttaaagttttttttacaatataatctacaattattttaggagtataatatattccacttgcttttttagtatctacatctaagctattctcatactctttagacagtagaaaattatcttgagatatatcatccataaccgaaaacctccaattattatcatagctgaaaattttttattctagtatttgtcttatagattttctcgataaaagtttataaatttctttttctatttctagcaattcacgatttactttacaaccttttaagcaattactgcaattagatacatatctcgtacatttatttatatatatttttccatcaattacttctacaatagttcttagacttattgtatccaatgacacatttaacatgtatgtcttgccatcttctttgttaaaagtaagaatattgtttgcacaaagctttctaagcagtctgtatagtgttagtattggtatatcttcactttttaatatcattttagcatctattggtttatcttctccattattaaatatagctcttatgattcttattgaataatctacatcttctgaaatcatccttactcctcctcaactgtcatgcatttatctaaaagagtatctttcagatttatataacttccgtcagtaagaagttttttataattcatctcatccaaaggtttaaaaaatacataaccttgtatgaaattacatcccagttcacttaagactttgacctgatgcatatcctctaccccttcacatataacagttacgtttaaatcatgtgaaaggttaataattgctttcaccataaactttgtttttgtatttgtaactatatccaatataagtgacctatcaatttttataatatctagtggtatccccttaagattgataaaatttgaattacctactccaaaatcatctaatgatatattcatacctaaagatttaatctcataaagcctttcacttataaattttacatctcttagcgctgtcgtttctgtaatttctaattctataagttcttttggaatattatatgtattaaacatcagtttaaaaaaatcaactaaatcatttttatatagttctactctagaaagatttattgagactggtaagacatttataccttctgaaatccacttgttaatggtaataaaaacttcttgaattagccatctaccaatattgtttatcagaccatttttttcagctataggtataaacttatttggtccaaccatgcctaatgatgggtgcaaccatcttatcaatgcctctgaacctataatgttacctgtacttgaatcaactttaggttgatagtgaattacaaactctttatttttaatagccaagaataaatctctctctattttcataattgattgtatttcttcttccatagcattatcaaattctacatactctatgtgctttagtccttttgatttaagccttgccatatcagcattatctatagctttttttatatcaatttcattattgttaaatttataaattccaatagaagcctcaatatttatatccattttaaaactgtcaatctgacttaatatcataattttattcttgataagatttactaaataaggaatcttctgttccctattttcaagctttattattaatacaaaaacatcactttttaactttccataaatagcttcttttccaaaataattttttaagttacttaaaatattatttaacacttcatcccctagctcataaccatatatatcatttataagtttgagtctacataaatcaaaacaagccattacacagttttctttttcattactgataatataattttgaacatgttttaggaagttctcatctttagtaatatttataaacttatctgaattatttatcaatcctaaattaattttatcctcatacaacttaattttaagatatgaaataaatacatttatactaaacaaagttaataaaattaaaattaaaactttaatatctacctcaatatgtcttgtaagtaaaactattcctaaaattccaattataataaaaattattttatttaaactgtaaatttttgtcatgctatttttattcatataaattcccctattttttaaattatcttacagttaaactttatatatactaattataaagcacaattgatagcaaatcaatgcaagttaaaatcacatataaataactacattacattatactaaatttatttttttaaattttataactataaattttttgcaaaaaaaactatgaaattagatatagataaaataatttctaatttcatagtttctaaattcaaacaatgtttccaacattacgaaataaagttaatacaatttacacagttaaacttttaaatttatcctcacattaaagtaaagttaacttacttattccctttagaatctaggtatgaaagtacaccttgaacaattccttccgcaagttggtcttgatatttttcatttattattttttgttcctctgaaggtgttgttaaaaaaccacactctattaatatagcaggcatatttgattctctaagtacttcaaagttattttcaactattcccctatctctaactttaacataggatactatagtactttgtactgtctgtgcaagttcttttgaaccatctgtagctttattcctataccaagtttctatacctgttgctgtattaccatttttctctgcatttaaatgaatagaaacaagcacatcagcagaactattatttgctaagatagctctatcctttaatgatatatatgtatcatcagttctggatactactacttgaatatccttttgtttagataatttatttgctaatttttttgcaatttgtagatttaggtctttttcatatctattactggtcttgctttcagttcctttatcattgcctccatgacctgggtctataaatacagtatattttttctttttattttcctcttcattaccaaggtcaaattgttctgagttaactttttgttgttgactagttttattacttttatccatactttttaccaaagctactacaccttgagtagccttaaatgcaataaataaaaataaaactgtaaagcaaatcaacactgctaactttttcttatttaattttcgcttttttctattcagatgactggtctttttagatttgtttcttgaattattgttattattgccttttgacatttcttcacccttcttggtataaatttttacacttttacatattattagtgttattttaccatcaagaagtttttttttcaataatttaaaacactctacaaccttaaatcagaatatttttaattatccacctaaagtgacatcttgtgtatcataccaactaaatgcgtcctttatatcgtcactcttaaaatctggccaataattatctataacataaaaatctgcataaattgattgtacaggaaggaaaccacttaatctccttcttccaccccatctgattattaaatctagtctggatacatcaaatgactgtatgtaatcctgtatattatttttatttacattttctactcctgatatattatttaagtcccaataccacccataatttaccagaagatttgcttttatttgaccttctttggctttaattctattagtatatggtaataattcttctggaaacattggagattttgtatttcctacaactaataaagcagcaccttcatctattaatatatttgcagcatcaatacatgcttttgtaaaagcttttgtctgcactgatggacgtcttgtattatcagttgtaaatccataaaaagtcacctcttcacagcctaaatctctacataatctataagactctaatccagggtctattccactttcatatcctttatcttttgtcataccattttgacttgcccaccttctatttccatccggtataattcctacatgttttggtattctcatttctaatcacctctcaataggtattattatcaaaatattacattattaatcaaaactgtaacattaaatacatttatttttatataattatgtagtaaactaatttaagacagagtttaaaaaacttggaggtttatcatgaaaaaaattttaatattgtttttttcgataatcttatcattaggaatggttagttgttcttcaagtggtgattacaaaaacgtttctacatcaaaaataaaaaaagcattaaaatcttctgatttacttataaaagaatcaaaaatctttgatgcaaaggactttaactattttaatgatgtagaggaagacataattcaaggttttgtaattaattcttctgaaaaattatctctagaagatattatcgttataaaaactgacgaggtagataaaatatataaaactctagaaaattataaaaaagatatgatacaagcaccttttggagaaggacatggagaaaaaatcaattctgaaatagcaaataatactataattgagaaagcaggtagatatgtttatttaatttctgctgaaaatgcaactcaaatagaaaacaaaatactgaatatcataaaaaaataaatatctattattgatgtttattaaatatcaatgtaattttcgcataaataaacttatttatcaaaattacattgatatttttttgatttcttcaaaataatctttttcatctatacatatgactatccaatttttatgacctcttttatcttatctacaacgccattttcagtatttctttttgctctaaatctagcaatttgtttcaaatgttcatttgcattttccatggcataactatgataggcacttttcatcatttccacatcatttaactggtcaccaaataccatagtttcttcatattttatatctaacattttttgtactttttttatggcactccctttatttgcaccttttgcagttaaatcaagccactccactccagaaatacatacttgagctctatcagaaaacttttcaaagtagatattattattatgttctgcacctttgaagtcaaatacagctatcttcaatatatcgccttctactttcgtcaaatcgtctacaattttaaactttgcataataagtactaacctcttgtataaacgcttcatctttgctttctatataagcgtattttttcccactcattacaatttttttcccttttatacttcttgttgtctctatgatttcatttactaattctttatttaaaggatttgataatatttcttttcctttatatactactagtgttccattttctgatataaacatcatatcatcttttatatcttcaaatttttttataagattttgatactgcctgccactagcagcagaaaacattatccctctctctcttaattttttaaatactttataaaactctggatttatttcgctcttttcatctaacaaagttccatctaaatctgttgctattaattttatcatacatttcctcccccaaattattaatttataattattttttattaatttttatcggtttgaattttcaattcttattatacactaaaaattttaaattacaatttacacctttcataagatgctataactacattcaggaaaatatttttttcaatatacacatcagtttataaaaatttaagtcttcatacaattatattccaataaaatcaataataactacacactttcttctataaaatactataaaaataattatattatgacaaacttatgctaatttattgtgttttttattgcttatgtaacaaatttttaatataattaactatgtgtaattaaaaaatttagaaagtaggggatattattgtcaggactcaaaaagttcgttatatttctagcccttttagttatagcatttcctgttagtatatatggatatgtttttactaaattaaaaactatacaagatgatagtataaatacagaggcgcttagtagtaatgactataaaaacgaagaaaatatcacaaacatattattgttaggtacagatgcaagaccaggagaagaagtttctcgttctgatgccatgatgatacttactattgataataaaaataaaagtcttaagctaacttcattaaatagagatacttatgttgatataccaggacgtggagaacaaaaattaacacatgcctacgtatatggacaagctaacttattaatagaaactatagaagaaaacttccaacttgatatacaaaactacgccgtagttgactttttctcttttatggatatagttgatgctttaggtggagttactgttactgttgataagagtgaaataagagaattaaataaatttattcctgaaacttataaatggaataaaaatgacaataaaggttctcttaaatatataagaaattctggtgagcaaaaattaaatggatatcagacacttgcattttctcgtataagaaaaaatgatagtacagatgaaagagatagaagacaaagaagtgttatacagagtttaataaatggtgttaaggatttaccagtcactaaatatcctaatctagttaacacaatacttccgtatgtaaaaactaatatgaatcctaatgaaataatatctttaggaaaagaacttttaagtataggaaatttaaatttgaaatctatggagtttcctctttctactgaaaatggtagaaaaataggtaatgcaggctatgtaataccttttgaggaatatgaactagatgcaatgcatgatttcatatttaaagatattatggttgaagattagaaattccaaaacaaaccaataatttgatgataaatacatacctcttaaatgcaaattgctttgtatttatggggtgtgtttttattttaaaatataaattacttttaaaaaatatattatatatacttttaactatacatataggtcgataaattttcttataaattatatcattgtcttttttttgtaactgaaacaagtattgaatatatctcaatactttaatataattaagtgtatgctattaaaaaatatacaggaaaaagaagaaagaaggggtacttttgtcaaaattaaagaaatttgttatactactggctttcttggtagtaatattccctataagtgtctatggatatttttattataaattatctgctattcatgactcgagcataagtagtgatttattggataacaatgaccataaaaatgaagatgggataattaacatactacttatgggaacagatgctagaccaaatgaagattcttcaaggtcagatgctatgatgatacttactattgataacaaacacaatgatatcaaacttacatcattagctcgtgatagctatgtagacatccctggtcatggtaaacaaaaacttactcatgcttatgcttatggacaagctgatttattaatacaaacaattgaagagaattttaatattgatattcaaaattatgcttgtgttaatttcgaatcatttatgtatataattgatgctattggtggcgttgaggttactgttgaaaaaggagaaatacgagaactaaataaatttattcctgaaacttataaatggaataaaagtgatgataaaggtagcatacaatacattagaaactctggaaagcagactctaaatggatatcaggcactatcttttgcacgtatcagacacaacgatacagcctttgctagagatggcagacagagacagattatacaagctataatcaagaaaacggaaactttacctgttactaaatatccaggtttattagatgcagttcttccatatgttaaaactaacatgaagcctaatgcaatactttctttaggagctcaagttttaaaaatgggtgacttaaatattaagcaatttgaatttcctattgatgatgaaattcatagtacaggtggtatatatggaaaagctggatgggttcttagatttgacccagatactttagacatattacacgattttatatttaatgacatagagtttaaacaataaaaaattcaacataaagtttattaaaaagtataagattaattactaaaaaagaactatatcgcataattattttcaagttgctgtgtacacttgattacaaaatgcatatagttcttttttattttctaatttatgatgataattttcattttaatctacatttataaaatactctgtattttaaattaacttttttattacttaactaagtttaagaaagtgtttaatgtgttttgatttataccatctccagcttcgtatactagagcagttttcttaggctctaaagcagttttctgagcagatgttacactatttccaagcataactactggtgattttaatttagctgctaaaggacctgatgttaatgcatctaccaattgattacttttacttacaaacattgatgaatattcagcatttggatagaatttttgtattacttttccatttgtttcttctctattttctccagctattctatttttagatacatcatttgtaatgaccttatccagcttatttattactgaatcagatatacttagattaccacctataaaataagcatcttttacttttaaatctgatatccaattgtaaacttcatcacttacattatcttttgatactagtactattggttgcttttcttctcctgcttttgaagctatagaaagagaatctgcttcacctgtaccacttgttatatatagtttttctactggattagtttttactaattcttttgctatcattaaagatgtactatatctatctgaaccaccaactctatttattgatacatttgacaatgtatcttttatctcactctcaactttatctccaatagagttatttcctccaattaaaataactttacttggattaagtctttttaactcattcttagtggatgtaggtatattatccttatttaccaatagtataggagcatcatttgatgtagcaagtggtgttgatgttatgccatcaactatagagtacccatttactaatactactgtatctgaatttgtagcccaaccttttttacttattgctactgctgtgtcatatctttcgtcgcctcttaatttctccactttaacattagatggtggagtaactggttcttcactactagaatataaactctttaaatccttttgtatagaagtactatttgctatatctttagctgagaaatacatactaccttttatttcactatactttctatttaatgttacttgttgtactatttcttttgctatattttgtccaccataactagattgaccttgcttatatataccttgtcctatgtataagtctacatttgttccttttacttcattagcccaccatgccactaatttagaataatctgctgctttaagaccaattggccagtaaagttgtggaactacatagtcaatcaatccttgttttatccatgctcttgtatctgcatatgtacctacataactttcattacctgatgtatctgaacctgttgggtcactactcttatttctccatatacctgctgggcttacaccaaatacaacattaggctttatactctttatagacgcttttacatctctaagtagagtatttacattttctcttctccaattatccttattttgtccttttccatatttttggtatgttgcagtatcattgaaacttactcctggatagaagtaatcatcaaaatgaactccatctatatcgtaattttgaactacttctgctatactatccactatgtactttctaacttctggtaaacctgggtcgtagtaatacttatttccatgtttaactacccagcttggatttttctttgctggatggtttgctggcaatttatctatgctctcatctgccatagttattctatatggattaaaccatgcatgaaattccattcctcttttatgtgcttcttctattaaaaatggtaatgggtcatatccagggtctttaccttgtgtaccggtaagatattcagaccatgggtttatatttgatttatataaagcatctgattttggtcttacttgaaccactgctgtatttattcctacactttttagtttgtccaataaatctgtgtattcctttttttgcttggcttcattattcttagtcttaggccagtctaaattataaactgtagatatccaagcagctctcatttccttatcatttgatgaatcggcaaatgaacttacactacacatagtaagtgtcattatcaatgataatactaatatacttatttttttcatttcatcccccttaattttttaaatttattttttctacaatatacttcttattaagtatatctaaaattcatattatctgtcaaatattgaataatatagttaaaatttatatttgatatttgattataatatgaaataatttattataaaaaaaacagcaaagaaatttatcttctttgctgtttttataacgttcatcactattttaatattactaaactcttaaatctctatgtaaaacattaaatgtaattatatatttaatgttaatattcaatcctatgtaaatcaatatctattattattgtaaaacacgtgtagcagttataagtcttcttgcataattagttcctggagccatgctagtaacttttactacatctcctgtttgtggtgaatgtatgaatttagaatctcctacatacaatccaacatgatttattgaaccacctgaaccaaagaaaactaaatctcctggttttaattctgctcttgatactttctttcctactgttgcttgtgatcttgatactcttggtaaattaacccctgctccatttttatagacataagaagtgaacccagaacaatcaaaagcatttggtccagttgctccccatctatatggcttaccttgttgcttaaatgctaagtttaaaacattttgtacctttgcatctacatttccaccttgaatagttaaataatctccatttacccatcctgtaacattgtcaacactttttattttaatccatccatttgaatgtaattctaaaacttcaactttgtctcctgtgtttatctttcctactactgcatcatttgcactagctccacttcttacatttaaaaaatcacactggtctactgttgcactcataggtgaattagttggctctgctgcactagccgttattgctcctgcttctactgtgacaactcctgctattaacaccatagctataaattttttcaatatatgttttttatttttaatattcatcataatctcaaatacctaatcctttcgaaaatttaacattttgttccttcgtttccaattcctaattaacattctatcttacatcaaaataaattgcaaccttttttgtaatctttttgtaatctttttgtaatcttttgtttctttttagtatatatttgtttctttttgctccccctggttacaaattagaaatatattctacttttctctagttgttgcaatttctttgatattagcatcttctggtttaatataagttggcactaattccctcataataccatctattttttcaacctcttcattgttagtaatttctcttaaaagttttaagtattttgttattttttctctatcaacatctattggtctaccaataaaaatctttttatgctctgtatccaacagaccttcttctgacataagtagttcttcatacaacttttctcctggtctaagaccagaaaattcaatttttatatcaacatctggctcaaatccactgaatttaattaagttttttgctaaatccaatattcttacaggttctcccatatcaagcacaaatatttctccacctttagccatagccccagcttgtataactaagcctactgcttctggtattgtcataaaatatctaatgatatctggatgagtaactgtcactggtccgccatcttcaatttgcttcttaaaaagtggaattacactaccattactaccaagcacatttccaaatctaacagcaacaaattcagtctggctttcagcattcatagtctgtataatcatttcagcagctcttttagtagctcccattatgttagtagggtttacagccttatctgtagatataaggacaaatttcttagctctatattttgaagacaagccagctatgtttaaagttccaaatatattattctttatagcttcgccagggctcgattccataagaggaacatgtttatgtgctgctgcatgaaataccacttctggtttatatttattaaatatttcatccattcttttttcttctcttattgatgctattactgtctttaaatctaatttatttttatattttctaagtaattcttgttgtattgagtaagcattattttcataattatcaactataataagctctttaggattaaatcctgcaatctgtctgcaaagctctgaaccaattgagcctcctcctccagttattaggattacttttccctcaatgtaattacttatctctcttaaatttgtttttataggctctctacccaacaagtcttctatctctacttctctaatctgttttatatcaacttttccatctataatttcgtaaattcctggtattgtctttattttacagttagtgtttttacatatatcaataatctctttttttctacgtttctctatgtttgctattgaaaagattatctcatctacattgtacttttctaccacagcttttatatccgaagttgttcctacaattttcacattatggattattcttccaattttatctttatcatcatcaattatagccactgctacttttttaagttctgaatttctttttagttcctgtataaccatttctcctgcatctcctgcaccaattataaggatatttgaaacctttcctctagaatatgtcttgttcatgactattcttatagctctataagctattcttgcgccacttgtaaacattataataaatattgtatttaatacataaaacattataggataatcaaaccctaataatttatttattatataaatcggaattaaataagctaaagttgccacaaaaatagatataatttcttcttctcctgcatatctccataatgtgttgtagcacttaaacaatctaaatgatactatatgaagtactatatatatacacactgaaattattatatcattagtggtaaatgcatttaaattacctgtcaagcttaaagacattcgaaacgctactagtacgctacaaatatctagaattaatagtgttaaatgtctaaatttatattttttaaaaagcctattaaaaaagctttctttctctaaatctatactttctcgcataactagaagccctcctttaaacagcaaaagctacgcacctaagcatagccaacaacatctatcttttgctgtattttttcattttattttttatatttatcaaatatagaatcataaattttttctatatcattaaagtttaaattaacctcataattttctctaacaaattgacgccctttcttacccatattaagtctaagttcatcattttccattagttttattatagcattttttatttcttctggttgttttggttctacaattaagccagtttcattttcccatacagattctggatgtcctcctacatttgtaactataacaggtacttcacatgcttctgattctatagctgccactccaaatccctctcttaaagaaggaaatacagttacatcaaaagaattaaaagtcttgcttacattttctggagatattcttcctaaaaactgaacatcattttctatacccaattctttagctaaatttattaggttgtccatctgacttccagagccacctattttaagaattattttcttatctttatattcatctttaagcatcttaaatgcttgtattaaatattctattccatattttttttctaaactctttataattcctattacaaaagcgtcttctttttctacttccataggcttaaacctatccatatctactccaaaaaaggttacatctacatgtttagctgtatatttattagcctctttagccatatctctactatttgaaaagatatagtctgcttttctaaagttatgttttataatttgtttttgtataaaaccattattagggaaatcataaatatcagtaccccaaacagaaataatatatggatgatacccaagtagacttcctataaatccataactacttgcatactgtgcatgcaatatatctggctttatttcatttactagcttctttatctgctttattgaacctaagtatcccgtttttttagaaatattttcattttttaattcttctacattagaaccaaaattataaatttttattccttccatgtgacctccatttaaagagattacatgaatgtcatatcctttatttttaaaaaaactacaccattttaaagtatgaggatttgacccatcagctaaataacaaacagtcttcataatatttaccttcctatcgaataatactcaattcctaactcttccatatctttaattttataacaatttcttccatcaaggactaaaggatttttcatcttttccttatacttatgtatatcataatttaatacatctttccattctgtcattataaaacatatctctgcatcttctatcgcatcatctacagaatcagcataaagtatagagtcaccaaatattttcttagtattatttacaccaattgggtcgtatacagtaactcttgcccctctttcaagcaaatattttatatttggtatagatggtgcttctcttatatcatcagtgtctggtttaaaagtcaaacctaaaacagcaactttcatatcttgaaagctctctactaacttagatgcctttctaactaatttaagtttttgactttcattaacttctattgcagcttttactgtttttaattcataaccattatgttcagataaccagtgaagagcttttgtgtcttttggaaagcaagaaccgccataccctattcccgcctttaaaaacttacttcctattctatcatcataactcattcctaaagctacatcttctatgttagctcctgctatttcacaaagatttgcaatatcattcataaatgatattttaagagctaagaagttatttgatgcgtattttatcatctcagcactatttctatttgtaactattataggttgattaaaaggcttatagatttcttctaatatttctctagcccattcactttctacacctataacgattcttgaagcatatagagtatcttttactgctgttccttgtgataaaaactctggattagatgcaagctctacttttacattattttttaggtttctatttatataatcttctatctcttcatttgtaccaattggaactgtagattttattactactagagtatcttttgtcacagtttcagctatttgctttgcaactgcctttatataatctaggttggctgagccatcacttctctcaggtgtacctacagctattaatattacatctacatcttcataagcttttttatagtctgtagtgtaatctattcttcctctgttgtaatttttaaccataagttcttctaggccttcttcatatataggtgctattccaagtttcattgatttaactttttgttcatctacatcaacacagactacattttcattgcctacctctgctagacaaacacctgtaaccaaacctacatatcccgtcccagctatagctattttcatttttttacctccaagtatataaaacttatactctttttttaatggcattaaaaacatagaaacaaaatacatatagactttttggtaaacttaaattttcaacatttctataagtattccaagttcgttttaatgcttttatcttgttacttgatatagaatttccaactaatctgtaattcactaaatcctcctgaatcccatatgcatatttttcctttttaagtaactgtaaccaggtcgcagtatcttgtcctcttcttaccaaaggcatgctgaactctcctacaatctccttatcaatgaccactgtagaacatcctattatagtatttctaagtaatccttcatagtcaattttcttaggagctcttgcaaccttattcgtttttgacccatcttgtctcatatatctataagatgtaaaagaaaaacctacattttcttttaacatatattctatctgaatctctaattttctactatcccataaatcatcactatctacaaatgcaataaatcgaccttccgcattcttaataccaacatttctagatactgcagctccagaatttttttcaagctttatatattttattctagcatcttcttttcgaaaactttttataatttcacttgaattgtccttagaacaatcatccactaataaaagctgccaatttttataagtttgattttggattgactttatcgtctctgataaaaactcttctgaattataaacaggagtaattatcgatactaaaggctcattcatatttttactctccttatatagcaactagcagtactataccaacaagtttacttagatactaattttctttgtccaatatatttgtaatatcctaatgggaataatgctaaatacaacaatttatcagatacttttcttaattcaccaaaataatgactatcagacaacaatgagtatctggctaaatttatgtaattttttatccacatatatggatatctacttaatggatatgtattttgatttattaaatataaaaactctaatgctctacctcttaatgcatttttacttaatatattcttagtcaaaccatcatccaaataatctcttattatcataggtttatttacacatataactttatagtatttagacatttcattccatactacactttctggtaaaaatctcacttcttttctttctggaaaaggaaattttataagctcatcagttacaaatactatgcttttatctcccttaacgccatacttaaaatataggtctgcaaagtgacatattttcttatcttcaggcatttctgtccctatcaaatctccacttggatatacacaaagtccaacaactccactaaatccttctttattctctaaagaatcccactcatcattagcaatttcaagagaatctttaattaaaccatcatcactatctacaatgaaaaatagctctccatctgcattttttacacctagatttattgcagtatgttttcctccattttctttgtatatatatcttatatttaatttattttctgatataaatttttcaactaactctttagtactgtcgctacttccatcatcaacaatcaaccattcaaaatcattgaaatcataagtttgagcttttaaatcattgtacaaattttcaagtaaatgagctctgttatacgtcggagtaaatacagtaaatttatatttatacattaattaaatcttcctctctgtctaactttttttgattccgtttattccataattaataaagtagtatatagctttgtataaaggtattttttctatatttctatatatattccaagtccacatagcagcttttattttattaccacttagggaattgctagattttctatataatgctagaacttcatttattccatgagcaatatgcccttttttcaatatcgataaccataaaacatagtcttcatgtcttacaccactcattcttatttcaaaatccaatttagacttatcaatcacaacagtaagacatcctaagatatttccttttaataatcttttataatctacattaggtggaacttttattactttgtttaattttttatcattttcatccatcagttcatatgaagtaaatgaaattacatagtcattttctaacataaaatttacttgtttttctaacttactgctattccattggtcatcactatctaaaaaagctataaattgtcctgttgccttacttagtgctaaatttctagcattagagacacccttattagtctcagtctttatacattttattctactatcctgttgcatataagatttgactatattaggactattatctgttgagcaatcatcaataattaacatttcccattcttgataagtttggtttaatactgattttatggttgcttcaataaatttttcagaattatacatgggagtaattatagatactaaattcttcttcatattaccttcctcatcatttataaaatatttatttaattttacttaatacacaatcatatatcctcttgcagttcttattatcattatatctgaaaaacttatttctttcatttttttggttatccataacctcaaaattattttcaataatatcaataagtttattcacggcttcatcattattataagccaaagacccaaacatttcactttttaaatctatatatgaatcaactttttccatatattcatccaaatcgaattggtaaaacaagataggtctattcatatacaaaaagtctatggctacacttgaataatcagttatatttgcagctgattttctgatttcatttgctagagttacccctttatctaaaaacacaattcgttttcctgttatattttcttttatatcatctataaactcatgcataagatgatgcatataaatttttacatttatatctttctcatctaatattttatttaatttgtcatcatttaaaaaattcattatatttttaaaataatctgtatccgtaaattttcctgaactaaattttatccaatctctccatgtaggagtatataatatatctcgagtttgtgcaacttcatttgttggtaaattgtcatatcttgcattcccaattatataaactgagtcatctaacattccccaatcatttaccataacatttctttcaaattcagaacttgctgtaactatattatagcttttatataggttatctataatatttttgaactttttgttcataggttttctttttttaaagcttatagtcccatgatttaaaaacacttttatcgtttttttatgaaaataattaagaacaggtacagcaaaattgtatggtgctatatctgctgatggtgcatgtgaaaatactatagcttttgaattgtaataatacagatagttttctacacttcctcttattaattttttgcctggaattttatcaaatactttactgtctttatttactacccaataagtttctacatcattatgttcttttagcatatactcataaaaaaactttgaattatcattgtatatatcccctgaatgtccacctataagccagatatctctaccattaaacttatgcttattaaatggatatataaaaaaagccaaaagcatatttattaaaaatttaaccttgtccataaacaccatcctcattataacttgtactgtctaaatccattaattcttccttttatagtggcactatgataatctctattggaactcaatataagaccccctatatttcttacaagttttgataccataacttttgcaaacgtataattttttctatagactatttcctttttgcaaagcgctccaaagcctcttccataattataatctttttgatacttttctttagatttagaatgtttttttgcaggatggtaaattatatcatttccaaagtattttcctttaaaacctaaactcaataagtttaaaacataatctatctcttcaccagcaccaaactctccaccaacacccaatttttcatcaaatcttgtataatctttaccttcaaaatcaataaaaaaagttatggatgttatagtatccaaaacgttggaacttgtgatatcacaagttccatcatacattttcttaaatgcatcaactttatttgaatccatagttttgcaactgtatattttataatcttcatttttattaaagaaatttataactttttctaatgtatcattttcgtagacacaatcatcatcagggaaacctataatttgccctacagcattatctatgcctacatttctgttataactcaatccttttttagagctttttatatactttatatctaacttatcaatgtatttatcaactatttctttaactttgctattatcattttggtctactactataagttcaaagtttttgtaagtttgattttctaagctatccataagtaagtatatatcatcatatctatttaatgttggcattattaatgatattaacattactacctcctacttttcatcttccacaaatctatttcccttttatcatttaatatcacttcttttattagtaatactactgcaaaactaaatgaagcttctaataataaattttctgcaaaagagtatagtaaaaatataaataaagctactaaatatgcttttttatctttttctataaagctttctattcctttatacatcaaatacataaataatatacaagcaactactcctagtacactaattatatatacataagaactatctaatggattagttgcttttatagcaggactatatgaatttccaaaaggttttagaaaattccccttttcagccaagtatacatgccagaacttaggtctacttgctaataatctatttaataaagtgcttttatcaaatattgtaccaataattacactaaatagagtaagtattattggtaatgtctttaggagcattggcagtccttttattttttttatatctatccatcttattatttctacaaatattaatcctgctaatatagtgaaaaatccagttctactatatgtggtttgataaacaaaaaatgcagaaccaaataaaattattctatcccatttattataatctttatatcttaagaatatatatgctgcatatatagtaaccatatgataaaatacactatttggattaccaagtccaaaatccattcttgtaacaagcatatctattttttctatatatctatagtggacttcctgattaaatattaatgaaggaaataaattaaataataatatagctaccattaaaaaacatgccgatattattaaataatttttaactataaatttatcatctatttgcttagctgatacagctaataaaacgattaataatatagctccttccctatttaataaataaagtaagacacaaactccaactagtaccatttctgttatactttttctcttatcaaataaaaaaagtagcattagtattcctattgaagaataaaataacgctgatttaatcatccctatatctatatttgggtcaataaatgatatcatatactttctaagtaatatgataaacaaaacaaatatataaagatattttctaatcataatatttctatcatcatttaaagtcttcattttactttctcccttttagcttcgtaaagtattacttgcaaatattttacaacacttccatatcttatttacacctgttaagtgtttgctttctaagaaataatttctctttttagcccaactttttccccaccaatgtatcccaaaagtgttttctgttatacattctggtgtaaagtcttctttaaatccaaaaggataaaaatattctttgtcgtaaacacgtattccttcttcataattatttgggtcaatcttcttataattcttttccataagatgagtcattatttttggtattgtaaacaatgaagaagtaagtacttctttttcataatactccaataagtcttttaaaaaaggatgtcctttttctacacctattatagcaccatttatatactctctatcatcttcatacccacagattagcctattattttctaaaagaggagttatatcctttaatatttgcatatctgtatccatataaactccaccttgttcatagagtacttttattcttgtataatcagatatgaatgcccaaagttttcttttataacattcttccaaaaacttatttccttttatttctttctctatatcaaagtttttttcattccactctactatctcatattctggaagcttttctttccaagaatttatacatatattttctatatttccttttggaccaccaaaccatacataatgtatttttttaggaatcaaatgaacacctcctacatatattcttgtctatcttcttcttttaactgttctactatttttttgacatcttgagctttatcttttctacaaaccataactgcatcattcgtagatactactatcaaatcactaatacctattgttgatattaatttgtcatctgaatatataattgaatttttagtatctatagtaatattttcacctcttttgatgttaccttcatcatcagttggatatattgcacctagagaatcccaagaaccaacatcattccatccaaaatcaccaggaactactataacatcattacttctttccataataccataatctatagagattgattgtatagttgggtatatttcttttattttttccatttcttcttttgttcctaagtatttacttatatattctaatttttcatatacttttggcaagtatctcttaaaatcttctaatattttagataccttccatacgaacattccactattccatacatactttttagagtttacatattctttagcaatttcatagtttggtttttctacaaactccactacctcatatgcaacatcttctatcgtattttctctattaaaatttatgtatccatatcctgttgatggaaatgtaggagttatcccaatagttactagtttatcattattttctgctatatagatagctttttccaaaatagatttaaattctttttcatcttttatataatggtcagctggatatacacacataacaccatcaccatattttttcattatgttaaatgctgcaaagcctatagctgctgctgtatttctggcacatggctctggcaatatattactatccaaacatttatcttttactatatcctttaaagcttccaattgcttctcattggttactataaataaatcatctttttttgctagagaatctattctgtttatagtttcgtttattaaagcatcttctccacttaaatttataagctgtttaggtacttcttgtctactaagtggccagaaacgagttcctcctcctccagccattatgacattgtatactttcattatttatctccccttagctttttatatagaatccactacatttaatatataagatattaaattgttcaacttaaattctacatcttcttgattgtctgaatttgctccaaagtaaaatttaattttaggttctgtacctgaaggtcttatagctatccaagagccatcttcaagtaaaaatttaagtacatctgacttaggtaaatcatcaacaccatctttatagtctaaaattttatctacttttacatcagccacattatctattttaacacttctaaagtaaagcatcatctcttttattttttttattccatctataccttttaaagttactgactttaagtcctctttgtagtatccaaatttattatatgtatctatcaaagcttcatacaagttcataccttttgaagaatagtatgctgccatttcacatatcataagtgaagatacaacaccatctttatctctagcatgagttccaattaagtaaccatagctttcctcatatcccattataaaacttctatcattgctttcttcaaacgcttttattttttctcctataaatttaaatcctgttaaagtatttaaacaatctacattataagcctttgctatttttgcacctagttctgatgtaactatagtttttattattgtaggattgtttttaggaagtttattttcttcaactaaactctctaatatatatctaactaaaagtgaaccgacttgatttccatttaagactacatattcaccacttgaatcttttacaacgatacctactctatcacaatcagggtctgttcctattatcaaatcagtgtcattattctttgccatttcaatagctatattaaacactgacttttcttcaggattaggatactttactgttgaaaaattagaatctggtaattcttgctccttaactaccattacattttcaaaaccacattcatttaagacttttcttactggtttatttcctgtaccatgaataggtgtatatattatttttaattttttcccgtattcatctattatattttgtcttaaaacttgcttcttaacagcttttataaactcatcatctacttcattatctaatatagttattaaatttttagataaagcttcttcaaaatctatacttttaatagtgctgtaatcatcaatcttattaacttctgctattatatcatttgccatatctatacagatttgaccaccatctgagtcatatactttatatccattgtattctttaggattatgacttgctgttattactattcccatagcacactttaaatatctaacagcaaaagaaagttctggtgtaggctttaattcttcaaaaatataagcctttacaccataagcacttaaagtctttgctacttctatacaaaactccctagacatgtatctactatcatgtgctataactattcccttttgtttaccttcttctccttgagtcttcatgatataatttaaaacgcccagtgtcgcacgtctaacagtataaatattgattctattagttcccgctcctattatacctcttaaaccacctgttccaaactctaaattcttatagaatctatcttgtatttctttttcatcatcttttatgcttaatagctcattttttgtttgctcatcaaaataaggagaatttaaccacatctcataattattcttataatccatattttcatcctttctgactctaatttaaaatttcaaggtaattatcttcttctaagtagtttttgttttccttttcttaaaaattcaaaagctaagtccatctcttctaccttaaataaaactatcaatacagtatatacagaagctccacctaatactccagctccaactgatataatttctttaattgttcctgaacccataaatgcatatagattattatatatcaataaagtagctactgccatcacaccagatgctaccaaactttttagaccagtctttataattttatcccctccaaaatatccatttttctttttaagagatataaataacaatataactgtaattatattggatgtactagttgatatagcaatacctgcatgacctaatggtcttatcaatattaaattaagaactatatttattattaaagctatacttccatttatcattggcgtttttgtatctgaaagagagtaaaatgccctatataagacatctcttactccacaagccaataaacctagtgaatataatctaagcgctatagatgtaagatctgttgataacgcatcaaatttacccctttgaaataatatcctaacaagaggctctgctaatataatagctcctatagatataggaagcaccaccaatataatacaatttgaagattttacaatagtacttataaatccttctttatcatctttaccagacatttttgctagcttaggatatataactgttattatagatgtaacaaataatgccataacaaactcatttagcctatttgcatagttaagagcagacaactttccatcacccaaagtagttgccaataatctgtcaacaaatatatttaactgtccaacagctactcctaccaacataggcaatactaggtttactaattcttttatagactcatcctttaagtttatatatggcttatacttgtaggacttcttaaatgcaaatggcagttgaaataatagttgactcgccatagccaatagtgctcctgctggtagtatccatacgtttttacctgcacttagtgctattgctgctattattataatattatatgggattcctataagcccaggaattacaaaactgtcattcacctgtaaaaacgaactaaatatcttacttccacttaggaataaaactcctgaaatcattattttagtaaataatattgctgcttggaacttagcagggtcgtttctaaatcctgctgcaaatactgtaacaaattgctctgtaaataaaagcccaataatagctattactatagccattatatagcatatatttaaaacattattagtaaattttaaggcaccttcatctccgagtcttttctttgtctcaaagtacataggtatataagttgtagcaactgcagagcctatgactgctatgattaaaccaggtatatttaatgttaatacaaatacgtctgcatacatacctgtcccatagaaatttgcaagtacaagttctctaaggaaacctaatacttttgaaaacatagtggctgccataatccacaatgctgctttagctgtttttgacatcttctttctccttatctaatttaaactctaaaagtagaacttttaaaactgcttataaacattattctaattaagtaaatttaacctatgaaaagcttccttataaattaaaaactatttcgactcatatctaagtgccctaaatgtaatcaatagtaataatagtattaatactatacaagataagaatgttagattaaatatgctcttaaatagactataatcacctactgtatacccaacttcaactacatcatttatattgctatctttcaagaatttatcttgtgcacgacttaagttatcactacaaatcagtattggcatattttcttttgctgatactactcccaaagaaatatattcgtttacatcagatctgctaccaaagtctaatttagcagtatagattttctttatatctttttcatcataaaacttctttattaaatcaacatttgtacttgacttatttatttgctttattccttctatatttttcaagttagaatcaatctctgcaataaattcttttgaatcacctaatgcatatatttttttaagattcttaccttttaagaaatcaatttgttcctcaaacccttcatctttagcccatattattggcattccacttttagcggcataagaatatacagatatggcattctctaatcctgttgttgagctaagtaaaaatgcttcatcaaatcctactgttctatacatttctctagctatctttaaagatgtatcatatctgtcttttcctcttattctttctacttttattcccattttttctatattacgttcagcatctttagatactgcctttaaaccacctactatcgtaaccttctctggacctagttcttttagataatttcttgttactctaccaagatttttactcttagttacaactattggagcattttttgcatatgctaaaggtgttgcacttatactatctacaattgactcttcatttacaagaattacttctttagaatccttaaatgctcttttatttaattctgtcgaaatctctggtatactcccttctatcaattctcttttgggatttgcatctgcaaatacctctattgtgctagaaatagagattaacaaaactaacgataatatagtagaaatttttttaatcataagttctcattccttttcttttttgtattttttgacaataaaaaagctctttttaaagagctttttcattgattagtaatctaatattttaaaattatctagctccgtctcctgtcaatactactttaacagttttaaagagtatcttaaagtcaagtaatatactcctattttttatatagtaaatatcttctttaagtttttcttcaggagtgatttcgtatccaccatttacttgtgcccaacctgtaagcccaggttttatagcgagcctgttgataaatccaggtatttcctcattgaattgaacagtaaagttcggtctctctggtctagggcctattaagcccatatccccctttaatatattaaacagctgtggaatctcatcaattctagttttcctaataaactttccaaccttagttattctaggatcatctttttcagcccattgtgcgccaaatttttctgcgtctgttctcatagatcttaatttatatatatagaatcttctcccgcattttcctagtctttcttgcttataagttattggtcctttgtcctctattttaataagaattccaaatattgctattaaaggtaaacctatcacaagtcctattatagataaaactaaatccataattctttggtacaagtcgaataaaaccgttccttttactatgctatagtcaatctcacttgcaatttctttatctgcccctggatagcttttaattttaggtatttcacactcatcattagtatatccagacatagttacctccatattggaataaaaatttttttaattcttaatttcaacttatttctatcttatttttgacttatttctatattatactcaataatgagcagattatcaatacaagaaacatcattgtaaacaatttgattctttacaaaaatatatcatctcttgttatattttacattataacaggagatgatatgttttgctttaatattttttattttattttactgtatcttctattcctattccaatttgagttcccattgtttttactttttctgcagtatttaacttatccatatcgctcttattgtcaataaatgcacattcaacaagtattgctggataattgttatttcttaacacatataggtaatcttttccattatcaagtgttcttgtcttgattcctctatttttcatgttaaatttttctagtattctttttaagatatttgatgctgcagtcttagttgttccaccatttttatcttttactttgtaataaatttccacaccattaccagctccattagacgcattgtaatgtatacttgtaaataaatctggctttatagtgtttgataatgctgttctttctcctaaagccattgttttgtctgtatctctagtcataacaacatttataccttttgaacgtaaatattcagtagttgctaatgctgtattaagagtatatttcttttcttgtgctccaccatttaatccacttgttgcccctgaatcagaacccccatgacctgggtctatcactacagtttttcctgctgctgaacccgaattatctggttctgttggtgcattgtgttttgataaactagatgctatagaatttataacactatctttcatcccatcaccaatttgatatactgttcctgctgttttttctgataagtttgtgctatggtatgcagaaacataagtctttggagttataagtattggagcttttaatttagctgctaaaggtcctgctgttattgagtcaactattatgtcagattttgcaactaacattgcactcaactctttatctggatagaaagtcttaattacatttgcatttgtttcatgtctatctgctccagaaactctattttttgaagtaccattttttgctattttagatatttggtctataatttttgatgataaactttgactaccacctatgtaataagcttcttctaaaccttgtgaagataaccaattatatgtaccttgtggtacagagtctttattagctaatattataggttgttggtcttcaccagcttttgatgaaatattaagagcatcatattcaccagcatatccatttgctatgtatattttattaacatcatgatacttatctatttcttttgctataagtaaagatgtttcatgtctatcaactccaccaatacgagttacatttacatttacagcagatttaatttgagatactgccttttgtgaaactgaaccatcatcacctataattattacatcacttggatttagacgttttaattctgcttttgtactttctggtatatcatctttatttgcaagtaatattggtgcatcatatgtagatgcaagtggagtagctgtaattccatctgctgctaattctccattaactattacaaccttactagacccatctttccaaccttgtttacttatctcaacagcagtttcaaatctagtagctccagcaagtttttttactggcgcagaagtttttctcatatattcatttactgcttttgttgaatttgcatcacttattataaactcttgtgtaacatcataatccttaagatttaatcccatagactctaagtcttctttgtttaaaactttctgttcatctttaccatttatttttatgctttgaagttcccatacatttaagtattctgggtctttgttatagtttattacaccttcatatgaatctgtcttttcattgtaatttaaagtagcttcaagtggcatatcataacacataaaatttaatgttattgaatcagcatttaatttttctttaaattttacacttgcattagatttacttcctaacactacactttttctttgtaaatttatattaatatctgaattagattctgtatttgcagtagtattttcagccgctaaagctacgtttggtgccaccattgctacagacaacattcctgttgccaataattttgttgtttttttcatcatatcccccctaattttttggttctttaaatctttaaatcttttttaatacatcttaagcttgttttatattacataaattcaatattatgtaaatcttttttcattatagcacaaaaaattacaaattgtaaactttttgtaatcttttatggcatggtttttaaattttatcgaggagaaattttgattatatttgatagtttccgtatatttgaacaaatcaaagactttatcatctaaaaatattgcactaaattttaataaatatttttttcttgtacattatagacattactataacccagaataggacatacaataaagaaaatataagagaatcccaagttgtacctgcccaaggtgttataagttcatatgtagtccactctaccaaggtagttggataatcgactttgttcgtaagttttggaacattccaaaaaacatgactcaatatctcaaggcacatatatgtaaaaatagggctacttccaagtgctattattggggtaaatattttacttttatttttgatgtcacatataaaataaaatattgacagtaacataccataactgccagccattaaaagtacaaatgagctagaccataatcttttattaaatggaaaatactgattaaagataaaagcacctattagcaggattatgctcataaccagtattttaaagaattttttatattctcctatgttttcttttaaaagtacacatcccatagtgcatcccaacatacctgaagaaattgctactatactagttaaaaaaccatctggttcaaattctggcttgtacaaatgtcccttgaagaaatgtaaatccactaactgtgcaagagaaccttctagctcaaatccataaggttttgctaatatgtagtacccaactattataaatgtagctatacatagaaaagtaattattgtagcagtacttccaacatttaatttttttagtagtaaatatactaaactagtcacaaaatagactaatcccatacgttgaagtactccaagtattctcacagaatttaaatcaggatttcctaggtaatttaagaaaaatccaaataatatcaataagatacttctcttgaatatactaagtattatactcagtgtggatttattattttttagtttactatttattgatattggaattgtaacacctaaagatataacaaaaaaaggaaatgcaaaatccgcaagtgttacaccatgccatacagcatgtcttaattgaggatacattctcatccaagtcccaggattattgcagactatcatgagggctattgatagccctcttattatatctattgatttaatcctactattcgtaagtttagaatctacaacattatttgaaattttattgctattgctattgctattgctattgctattgctattgctattgctattgctattgctattgctattgctattgctattgctattgctattgctattgctattgctattgctattgctattgctattgctattgctattgctattgctattgctattgctattgctattgctattgctattgctattgctattgctattgctattgctattgctattgctattgctattgctattgctattgctattgctattgctattgctattgctattgctattgctatttagattatttttctttattctagttttgtcaatacttttatttatttttttgttacattcaattccaatccccatgttacctccccaaagcttattcaaatatatactaaactacatatttatctataagtctgtttgtatataaacctgtttaactatataactttagaacaattacaacacacacttcacttaaatatacatattcttaactaagaaatttctttagaaatccaatcttatctagtatatcttgtattttattgactttttgacttatagaatctatagctttttcaattgaatctactttagcctctaaattctcaacttgattaacttttttatctatagtaccattattagttatatcactattagatgaattatctataagctttcctatatatccatcattaatcaattttgtatcattagcagaagctaatatcatcaacgtatctatatctgaatttctagtattttctataactctaccatttttgtcacgaactgacaatatagtgattgtatcatggttattaaatccaccttctccaatatttctaactataacatttaccaaagtagcatagttattcacttcaccattaggcatatctactgtaagagtctttgaacaatcaccctttatattcacagttattggtttatttgttaccattctaaaagcttcatttacagtattctcttttggtttaaagtttataatatcattaggacttgctatatttatcatatcagttaattcctcaacagtttttgcttcaaacacagttttttcttgtaaactcttaatttcatcaaaagcttcttcatttccatttccacctacctgtgttatagtatttaattttttagtactaagtatatccctttgtttcgtgtttaatttattaccaaccaaaacaacaggagactcattttttgcagccaatactccaacagctaacgagtctattagttgattctcatttttactaccatccttagttacatataaattacttaaatttgtatcagtataaaacttttctataactttggcattagtctcatttctatcttttccactcactctttctgcattaggaaggctcttttctacagctcttgaaacagaatttgttcctccaattacgtatgcttttataactttctcatctcttataaatttatcaaatgcttctactccgtccttaggactagacaaaattataggcatcttattttgagctgctggtgctccaacactaacagcatcacttaatcctttttcaccatttactacagcaacttccttaatatcttttatatccttaagcttattagccaaaatcagtgaagtttcatatctatccttaccattaattctttctacattaagtccattaccttttaacttgttctctatatctttattaagtacagcagtacctcctatcaaataaatatctttagctcctagacgttttatctctttttcagtcctatcatctagcttatcactttctgtcaaaagtattggtgctcctttagcctttgcaaatggtgtagctgaaagtgcatcagctaatgaattgtcattaactaacactacattagaactagaactgtatgccttttgacttatctttacagcagtttcatatctaccattacctattaatttttcctctgtaagtgcatatgatggtattatagaaatgctacttaaagtaagcgctattgtcagtattgttaaaatagtttttggtgctttcattattattcccccttattttgtttaaaatcttactatatttatattataaaataactttacactattttacagtttaaaattattacatttttcatcaataataagaaaactatctaaaaatatagacaagcctatttttcattatttaaatgataaaaatataaaacaacaaaaaagagtgcctcatgaactaaaaagttcattttgagacacccctttttgttattttatatttataaacttctattgaatattttttaataataaaatgtatatccttactatctttccattcactattttcctaaaagagtatttagttcattaaaagcactttcatttccatttccaccaactctaataggagtttctattttcttagacttaagtacatttttttgactttcatctaacttatttccaactagaactactggtgaatcagttttagcacctaatgctcctactgctagtccatctatcaagtctccttgactctttgaaccatctttaacaacaaaagcatatttcaaatctgagctagggtagaatttatctattatcttagcattagtttcatttctattacttcctgcaagtcttgttggatttgaaagcttactttctaaatttgatgataaagtagctgtaccaccaattatataagacttagttatttttgatgaatttaaaaactcatcagcaccttgcaactcactcttttcattagtaagtattattggcatattgttatcagcagctgctgcaccaatacttattgcatctgcaagtccatttacaccatttgccactgcaacttgtgaaacagattttatactatttaacttttgagctagagatatactagtcttgtatctatcactacctgaaattctttctactgatatacccatattactaagttgagtttgtacattcttgcttaaagaattttctccacctattagataaacttttttagttcctaatctttgtaactctgccttagtttttgaatctaagttatcttttcctgttaaaagaattggagagtcgattgctgctgtaaatggtgtagctgttaaagcatccactattgcgtctccatttactaatactgcattttgtgaagaagtccatcctttttgactaactttaactgccgtttcatatctatctgctccagttaaagattctcctgaagtagcttgtccagaagatgtttttgttatagcttttataacaaagttacaaggagaaaattcactatatgtatttatatcttcaaacttattgttttgaagtatgtagctttcacctaagtttgctttagcctcatatagatagtatccatctatatcagtttcatatgctaaagttgatttttctctattaggatttgctgtgttgtctataactactactattgctcctttaccttttggtaagctgtaagaattagtaggtacatttatgtatccagaatatgatactgttccacttgcaagttttgtcattgagttgttttgaggaactccatttactactggtgcataatatacttcatattttgctcctacagagtctgtttcaaacataacagagtcaagtttttcagaatctctgctaaaatcaaatacatttgctgctgttactttatttgacattatcttactaagaccagcatattcaagttggtacatttttttatcactatctggtttcgatactgatttcattgcatagttatctgtatctgttagtagagttttatcttcataagaaatccagaagaatcctttcatagaattaaattctccccaactgctttttactaaccatgctccatttgattctggttttacatcagatgcaaagttatcttttgaataattatcatcccatcctactatcgctacagcgtgatttaatggagccctcttatttgtacagttatatgctgtttcatctttattaaaatatgtcgaataatgtgcataacctgatgtcactgaaccatattgcattatagcattttttacagtttccttatctttattaagacgaacaacatctgttacattaaattgagtaggtgcagtatccatatttgaaggtttagttgcaccttgtgcctcagatttaagattatatggtatatctttttctaacttaggacctgcccatgctgtcagatatcctatggctgttacatttgaactacctgacatatcatctaagttccatccatattttccaccagttgcccaccatcttaaatgttcttctgataagtcatacgttccatatccctttaatttaagatatgcttctaaagttgacatacctgaaaaagaccagcatgtattaagacttccttgattttttgctggtgtagtaagaccaagatccattgggttgtatgctacacttgatttatatgctgatggaagactacttctgcccttatttcgaagtgttgtaccttccatttcatgtggaaaaggtattactccattatattttgctgtgtctccatttttgacatcttctaggtattgaagataactttcagaatactctgcagtttctactccatctagagttttatggttttctgctgagacaggtattgttgacactattaaaaagcaaactgtcaacaatgccagtagctttgacaatttttttgatttgtactttctcatgtttacccccttatatgtatttaatttttattatatcagatttctaaattaaggtcatattttattttgataaaatatggattatgagtacatattaattatagaatattatagttttatttttataatattttaagatatattgatttattaatagatgtgctatactaatgtttgttagtatctttaagtatatttatattaaattagattaggaggattatatttgattttaaaaaagcatagagagacaatattatatttattttttggagcatttactactcttgtaaatatagtttcgtatttattttttactagagttattttatttaattttatggttgcaaatgctttggcatggatacttgctgttttatttgcttatgttactaataagttttttgtatttgaaagtaaaagaattgaaataaggttcgtatttaaagaatttttgtcttttgttagttttaggctactttctggtgtcgttgaaatgttaattatgtatgtaatgattgatttgctttttgtaaatgatgttattgtaaaaatatttactaatatagttgttatagttttaaattacttgtttagcaagatgataatttttaaaaaataaatagcagattactaaatagtaatctgcaaaatgaataagtttaatgtctaaattccatcatctgtaatgctagattttccccatcgtgaaacttcattatttgaggtatctatttctactgcttctatatatgatccatctttggctctttcaataaaagattgatttgatattgtaaccatactccaacctttagtactaattttttctccaacatatttcgcagatggtttttcatcaactactctataataaattttatactttgaactctctggttttgttgatatagttattcttacataatcttttaaagcaggtatacaagattctactttaggatataaaccacgtgcctttttatcttcatctttatctgtatcattagttataggttttttaccacttattgatggttcttcacttccacttatagtattaatattacctgaattttttattgttacactagaagaattattagatattttagttatttctccacgattcaaaatatatacatcttttgaatttttaagtatcgttataagccatatttctccagaatcctcattctctattttacatccattctcatcataaacatctatcccttgtatacttccttcgttaactaaagtctcattttttatattatttattactagatcattatctatgtccccaaagttttttatatctccatttggcatatctatagttattgattgtttatatataccatcaaattcaatagttatagctttatttgtttctattttaaaagaattagttatatttttatctttttctggcttaaatcttatgatgtcatttgcatctgatttttttatagcaacattaagttcatcaatagtttcaacagtatacttagtttcttcttgcatatctattacatcttctacaacattttcattacccaatccgccaatttgaataactttatctataattttagtgtttaacacatctttttgagaactatctagcttatttcctgctaaaagtattggagaaccatttttagaagctaatacacccacagctaaagaatctattaaatcatgcttactccttgtaccatcctttgttacataaatattttttatatcagtatctttgtaaaattcttctataatttttgcatttgtctcacttctactactacctgctattcttgttgcatttggtaaacttctttctacagaattagaaatagaatatgtaccacctattacatacgatttttctatatctttactatctataaaattatcagctacttcagttccattctctgaatcagaaagtattattggcatgttttcttgagcagctatagctccaacactcactgcatcagcaagacccttttctccatttactactactattttagatatagatttttccctatctagcttttcagctaattttaaagaagtatcatatctactatttccagatattctttcaaaacttatattttctgcatttaactgcttttcaatctctgaacttaatgcaattgaaccacctattaaatatacatttttcacaccaagtctttttaattctgcttttgttctactatccaatttattactttgagttaataatattggtgcatcttttgctttagcaaatggagtagctgataaagcatctgctattgaattatcatttactagcacagcgttttcagactttttccatcctgcttgacttatttttattgctgtttcccatcttccagaacctgttaatgtatcttttgtagatgcattagatgtatttccatataatgtaacagttaaaaatgtcatagttaacaaagacactatcttttttgatattttcattaattcttacctcctaattctttcataatattttatggagcatgtacatactgtattttatttatagctagctcatcaaaatgagattttactgaatgatatcctatagcataatgtccactttcaggattccattttttatatgcattcattgcacttaataacttctcctcttgactaggtaataccttccatacctctacatttggattaacttttttaaaatccttatagtcgtatggttctacataaaatcttaaatcttttattttgccttctttatataactctagtgcagcttctcctaatgccctatggtcttcatgtattccactagctttaaacggagtaacagtttttacttttgcatctggatattcttctaagtacttaagtattatttcccttgccttttctttacttaactcaccatcatgtgctctattatcttctatatgtatattactttcttttacacccattgcttcacagctatccttaaattcttcatctctatcttttgaaaattcactttctgataaagagtatttatgaacatctttaatatgataagaacatgaccctccatcatccaaaacttttcttattatagatttactaccatctgtgcataatatgacatgtgtatcacttttttcaacatgttcaattatagcacttcccatacttaaggtttcatcatcttgatgtggtgtaaaaaataaagttgcatctaccactactacatcctcctactttataaaatgttataatttacaataaatagcataattatagaaaaagattcctgtattaattaaggaatcttctccacagtataagttattaccaacctagtattttagctatcttttgtattactgtcaattcaactccattacctatttgagttacttctgcaccaagatttaattttttactaagtgcattcctttgtgagtctgttatatcagctttagctagaagtattggacctttacctgctgctagaggtcctgctgccaatgcatctactagcataccattatttccatatccatcttttgctatatatagtttatctaattttccataatatgtttctataaccttagcattagtatcgtgtcttgtttctccttcaactctttgaacttttctatctttatcaacatcagcaagttgattttcaatttgactagatacattgttagaaccaccaactataccaatctcttttccatccatcaatttgatagcgtctgctgaaagatcattccagccatttactattataggagccttaagttcagcagctttggcagctatactcatagcatcagcctcccctttcgcacctactacaaatgcatctttaaaagaccccatagcttttgctactgctacagaagtcatatgtctatcatctccagctagtctttcaacattcttagttactgattctaattgctttttagctgtatttgatactgctgattctccacctactatatatattttagctgatgggcttttcttaattatatcttttatataatctaaagttacttttggtatttcattatcggatgctaataatataggtgcttttttagattgagcaagtggtgtagctgctaatccatcaactagtttatttgaattaactataactatattgtcagtatattttgtttgttttgctatagccactgcagttgcatatctatcatctccagctatcaatttaacctttgaattaccttctaatgcagctttggcatcttttaaatctttttcattagtactttctacagtaagctctattgcttttccagatgcatcagtatacttaatagtaaatttatactttcctgtttctgaatcttttgatgaaatatcactaattgactttgatgttccatttgctaccatattacctttaacagttaatctatatccatcatataaatcttgtggtgaaactgtatttaggtcactattttttatagttatttcagctaattggacatcatcaatatttttagctcctgctacacctagtttaacgattttatttactctaaatccttctgtagaagggtctaagtttgttcccgttgaatcaactggatttgctgttaaatcaattttttcatcaccaatacctatctctatagttttagaagttactgtgtctgttttatctcttaaagttataactaacttatctttagcactatcatatgaagcttttacatctgcaactttataaattccattagtttcagttttagctttttctgttatagaattagcctcagcggaaaggtctgctgaattttcatatttttcagttgcttctgcaactacttcatttgcactatttgttatatgccctttatctgttatagttacaataagttctttattttctcccaaagcatttactaatttctctaattcatctatattagttattatttttaattttgataaagtctcgccaacttttatttcatatattggttgtccaacttgagaaccaccagtatacttttgagacattaaatctctaactttcgaaactagttctgtagcttctttcttagttattgtttctttttttacctgtgtagtttctgcagcaaaaactggagctactgatgtacttatcattgcagcagccataattacagaaagattttttttattcatggtattttccccctaaaaaattcaaatttttattattttttccttatttaccaattataatatatatttgatattatttcaataaatgagacttattgtaataattaaccaaaagatataaactttttcttatattttatttttttaatatttatgtatacaaaaaagtaacaaaattgtaattttttttaataatccagtttataactaatagacttttcatcttctttatagtataatattaaatggaagaaagaaatttcaagcatctcttttttccgtatttctcacacagaaaaagaagctgattttcagcttctttttcatttgtattccttaattatttaattgtaattacaatataaagaatcaaaatattttatttttcatttaataaaaattacatgaacttttttagttaaatttatataagtattgtactgttgcttcccttatatttttatttaaagcttcaaacatatcatatccttctaaagcatattctttaaacggatctttttgagcataagatttaagacctatatactgtcttaactgttccatagcatctatatgatctatccagtattgatcaaccacttttaaaagtactgttttttctaactccgcaactttatcaataccaatcatcatctttttcaagtcataaaccctttttgaaatttcatatgtgctatcaattatctcttggacactttttttatctacaccgggtattagtaatgtatctgcaggcataaatgtactatataaatgtttaaaatatccataataatctctttttcttccaattaaataagtttctcctgcttcttgtatgatgtctttaaccattttttgaatatcttcttttatatcttcatcatttaacactttatttctttcattatatataacctttctttgctcattaatagtatcatcatatttaagaacattttttcttatttcaaaattcttaccttctacacctttttgtgctctttctatagcccttgtaagtgctttactttcaatagccgtattttcctttgaacttgttctcttcataagtttctctatagtttttccaccataaagctttattacatcatcttcaagacttacaaaaaatcttgatgtacctgggtctccttgacgaccagaacgccctctaagctgattgtcaattcttcttgattcgtgtctttctgttcctataacataaagaccacctaaatttttaactttttcttcttcttctttatctcctgcacctagagaaatatccgtacctctacctgccatatttgtagcaatcgttatagcatctaatttaccagctttagaaattacctctgcctctttatcatgttgtttagcatttaagacttgatgcttaataccttgcttcttaagcattttagataacttctcagatttttcaacagaaactgttcccacgagtattggctgtctagtcttatgtatccttattatttcttctacaacagcactatacttttcttcttctgttttaaataccttatcatgcaaatcagctctaataactggtctattagttggtatttggacaacatttaatttatagattgactcaaattccccttcttctgtctttgcagtaccagtcataccagaaagtttttcatatagtctgaagaaattttgataagtcacagtagccatagttttagattcattctttatctcaacaccttctttggcttctatagcttggtgaagtccatctgtatatcttctaccatccattactcttcctgtaaattcgtcaactatcattacttctccatttgagataacatagtcaacatctttttccataagcttatgacctcttaaagcttgatttatatgatgatataattctatattctttatatcagtaaggtttgttataccaaaaaatgactcagctttgcttataccacttgctgttaatgctatagttttatcttttctatccatctcaaagtcttcttctttaacagtttttacaaagttatttgctaactcataaagttttaaatcttcatcaccatctcctgcaataataagtggagttctagcttcatctattaatattgagtctatctcatctactatggcaaagtttagttccctttgtactttatgagacaaatctggcaccatattatctcttaaatagtcaaatccaaattcactatttgttccataagttatatcacatttatattgttcttttcttatacttgggtcttggttagataaaattacacctacagtcaatcctaaaaattcatatactggacgcataagttctttatcacgttctgccaaataatcatttactgtaattacatgtacaccttttcctgttaaagcatttagatatactggagctacctcaactaaagttttcccctcaccagtcttcatctcagctatctttccttgatgaattactatacctccaattaactgaactttatattgacgcattcctaaaactctttttgagacctctctaacaacagcaaatgcttctggaagtatatcatccaaactttcacctttgtctaatctaagtctaaaagtatttgtcatttcttttaattgttcattctctttgatttccatatctttttctaaagattctattttatctactattaaatttaattttttaatttcttgttcatccgctttatctaagattgcatctaaaactgacatattttttgacctcctcttttatcatacaattattattataccttaaaattatagaatagtagacaattattttattgtatagtataataatcatacttaaataaattacatctttatatatttaagtatttctcacataaaaaagagactaaatttagtctctttttttgtattcgaaaacataatataaaaagacttctcatataagaagcctttttatattattatatttatattacatacttaataaatcttttaatttatttataactgaagtagctatacctttaccaacttgaactaagttttctccattatctttatcaagaactttacttatagatacactttgatctgaagataaagaatcagtagctaatactataggtgctggagatactaatttatttttatcattatcagaaccagttaatactttaccatctttatctactggcttaccatcagaattaagagttacaccaaagtttgctgcaactggagctgctgctaaagcatcaactaattgatcttctttagtagaaccatctttagctacaaagaaattaactacttttttatcattatttaagttatcttgataataagaagattcttttataacttttgcattagttgcttgtctatcatctccactatatctatctggagatttacctgtagcatcatctattgcattttcaacatctttagatacactgttttctccacctattatatcaacttgtgaatcatctaagaaatcttttacatcatcatttatagttttagcttttccatctacaactactattggtgtagcatcaccatcagctaaatccattttaccattagcatttcttaattgagatgcaactggagctatactcatggcatctgctaatcctgttcctccaactacaaatgctttatcattatcaagacctacttcatcagctatttttagagaagtttcatatctatcatctcctgctaatcttgtaactttaagtcccatatcttttaattcattttctacttctttagatatagaattaactccaccagctaaataaactttctttgaagtatttatacctgttgtactctttatattcataactctctttatttcagcttttacgcttgaatctaatttatcttttgaagttaataataaaggagctttcttttcagaagctaaaggagaagctacaagtccatcaactattgcatttcctccaaccaatactacattatcaactgaatctctaaatatagcattttcatcatcagagttataatatttttgacttaatgctattgcagtttctattctatcttctcctgctacttctatagcatttgaatatccattattatatgttcttaaatcatccacataatcttttaagtctttcttcttatctgacttaagagttaatttaactggtgaattttcatcagcaattgaagcctttgcagcactcttagttgtaactctttttccttctggataaagaaccacttgatattttccactaacttcttctactaatctattagtatctgcttcatccccatttaatactctgtaaagagtatttaaatctgttttattaaatacatattttttagctaaatcttgtgctgttttactagaactagcatcaatatctattgtctcttcttttgcattcaatattctaagtttagttattactgggcttccagattgtgttgttggtttagcaaactcaatagtcgcagcttgatcatttgcacttgcaggtgttattattaattctttggctaaatttatagtatcactatctcctaatttaacaattttttctgtttttccatctgcaaattgaagacctgttgaataagtagttccatcaactaaaccaaactttttagttttcatagcatcttttatagtaagtttcacagcagtttcagttgaatctgtaaaagctgtatcaaatacatctgacatagacataactgcagcactacttggagctgtattttttgctcccggagtaccagcattttcgacttcaccaataatactacttgtagctacttttattgcactagttccacctgttaaattttttaatgcaacaagtttacttgtagttactttatctccctctgctggagagcttattaagaaatctacataatccccatcacctaaattgtctaatttattatctacttgtgtaaacaataatttacttgcatcttctgcactaagctcagctcctacttttatagtagatgctaaagttccctcaaagaaaattttaatctctgttatacttccatctaataaccctttttgtaattgttcaactgctttcttatacttgctctgtactactgtatatccttgatcaccagtctcaactttcgacatatcttctgctgcaaacacaggtgctgcagaagctaatactgttaatcctgacatagctattgctatattcttcttattcatttcttaaattcctcccaacattatattaaaattacatctcttcattatgtacatagaataatcatccatatattcctaatatttctcacatctctataataatccatttttattctttttgcaagtcatttttttgaaattattatttttcccaagcatatgagtttttatacccttaaactccaatatttaataacttaaaaaatttgattttacttatttaaattacttatttaaaaattcttgtgtagcatacacttctccattaggcaatatatataatccaaacccagtatatacaaaatcactatttaacatattttcattatatttatctgactttttccaaactgtaaatattacatttgctacttctctagcatcctttgttgtataagtactttttgtaacaagtggtacaaaagctatattttcttcacttctcaagccatatccagtaaatacttcaacagatttcttaccatttattacatgtgaaaactgacctttatctgccatgtacttagaccaggaattagaaagtccttctaagtttttagaaacttgtaatggctctttacctttttcttttctatatgaatttaccaaactatacatttcactagaaaccattcttttaaactcactactattcatatcattagtcttatattcaagtacatttacttctacacttattgatgtagtctttccaccaatatcagtagcttttatagtaactttgtatttacccaccttatcagtatcaatatttcctataagctctggtgtcaaatcgttaccattgctatcctttgctacgatattcagtttacttatatcaaacttatcaccttgataaatatttaaatttccaacagttattgttggtgcacttgcatccagtgatgatgcacttaaacattgttctagtgtcttttcatctattcctcctagtgctgtaatcttatcagcacttctaagtacagacttatcactatttccgtcaactaatacaataggtgcattttttgctatagaagaaccagcaactgcatctactaattgataacctttagaaagataaaattcttttgccgaactataaaaatgttttataacttttttattagtctcaaatctatcttctccagctaatctaactgcattagtttttttaactaaatcattacttattatctcctctgaaccaagagcataacattgcacaccttcttttttctcaaatggaacatttttaccattagttaaaattataggtgatccatctcttgatgctactgatgacgcactcatagcatctgcttcacctgtataaccattagttataaaaaccttatctataggttttattgaagctatttcttttgctataagataacttgtttcaattctatcattaccacctattcttttaacttctattcctttttgctttaattcattttcaactgattttcctattgaatcttcagttcctattatataaaccttctttacatcttttaacattttttctgtgtctgatggtatactgtttctttgtgataataatataggtgctttaactgttcctgctaatccacttgcacttaatccatcagctagtgtattatctgtatttactaatactacattttcatatgtttgtttctgtgcaattttggcagctgtctcatatctatctttcccttgtatcttttctatgctcgaaagtgcattgatatttggtgctcctgccattattaatgatattgtcaatcctattgataatactctcttatttaccttcatcgaactcctcctactaatttttttatataattcagctaatcataaattacatcctcagtagtgattccctcaaaatctataaactactaaaacaaaaaacacctaaaataccatagcctgtaaagcaataacaaaacagattacaaaaagtactttagatgtgattttcattttataatatcagtaaattaacaaaaaaacaagatttatggaattttttacaaactaccttcattgccatttaaaaactcctgagtagcatgcacttgaccatcagataatatataaagcccaaatccagtactatagaactcatcactaagcatgtttgcattgtactctggagacttcttccacacttcaaatatagcctttgccaagttttttgcatcttgtgtcgtttgaacgttcttagaatctatataaatatatgctatattttcctcacttctcattccaaactcagaaaatacttgtggagcattttttccatctatataatgtgcaaatacttttttatccatcatatacttagaccatgcatttgccataccttctagcctactagatactaccaaaggctctttgcctttttcttttctataggaattgattaagttatacatttcagtagataccatttttttaaattctgggctgttgtaatcataggatttatcatccaacacttttatttctactctttttcctgtactttttccccattcgtctgtagcttttaatgtcaatatgtatgtacctactctatttgtatctataaacccatcaacttctattggtaataccttcccagtgttatctttagccactatgtttaacttgccagtgtcaaacttttcacccttatatatctctgtacttccaactgtaattgttggtggttgtccatttgactttgaagcatttatacactgttgtattaccttctcatttatttcacctacagaagttatattcttagctccttctaatacagttttatcgcttccatcatttactagtaccattggagagtttttagtaagtggtgcagctgctattgcatctactaattggtatccatctgatacatagaatccatctgcactattaaaaaagtagtctattacatttttgttagtttcaaatcggtcagttccttctattcttactgagtttgtatttttaactagagggttactcattatctcctctgaacctatacaatatgattgaatattttttacatcaaaaggcacactctttccatctgtaagtatgattggagctccatctctagtagctactgatgatacactcattgcgtctgcttctccactatatgcgttagttaatagtactttatccactttttttatagttgctatttctttagctattaaatagcttgtttttagtctatcttctccaccaattcttttgacttctatatttttagaatctagttctttttctactgatttacttatagtatcttctgtacctattatatatgcttttttgatattttttagacatctatttgtgtctgctggtatcttattttgttgtgtaaatagtattggagcttttgtagctcccgataatccacttgcacttaatccatctgcaagtgatttttctgtatttactaaaattactgtttcataagtctgtctatcagctatctttgctgctgtttcatatctatctttaccgtatattttttctactactgatgatgcatttacacttttgaagtttactaagattaatgatactgctagacctaatgataatatttttttgttcattttcatatccccctgatgatttttatattttatatttatattgtgattattttctatttattttctctttattttccatatattatagagtatatatgatatgaatatatctcgtctatatattagtgttttattttattaaatttaaaaaattatttttaacttctttttaaacatattcaaaattgaatttatatttatatatataaaagatatctgctttatttaaaattaaacttaatatagctcaaattattatacattttaacctcaatattattaaattgttaagataatgaaaataaaataagaatgcatctaaatatataactttatatctaaatacattcttattttcgatttacttaatatttatttttcaattaaactcttaatcttatctactacagatgaggctattcctccacctacttcaaacaactttgatgaatttttaccttttaatgatgattcttgtgatttatctaacgtatttgtagcaagtataactggtgaattgtttttagctgctaatggtccaactgctaaagcatctataagtttatcttgatttgcaactacaactccatctagtttagattgagagtagaatttatctattactttggcattcgtctcttgtctagtttgacctgccaccctattgtttgatatatctttgtttgctatttttccaacttgttcaatagccttgttagatattttttctattccaccaataaagtatatatttgacaccttatttgatttaataaattgtacagcttcattatctacaccatctttttgtgtaagtactattggagttttttctttaccggccagtgatgctattgataatgaatctgcttctccatttcctgcccctatatacaatttgcttacattattcgtcttatctatttcttttgctatattaatagaagtttgatatcttgtatctccacctattctctgtactgatatttttgaatttacagctttgatagcttcaacaactgaatttggcattgagttgtttccacctatcacaattacttttgatggatttagccttttcaattcttctacagttttttgaggaagcttttcatttgatgataaaagaatcggtgagttttttacactagcaagtggtgtagctgtaagcccatccaccatgcttttatcttctccatttactattacaactgtatctgattttgtccaaccactttgagatattttggtagctgtctcaaatctatcagcaccttttaattttttgactgtgacattagatgtagaattacttgaacttcctcctccagaacttccaccactagacgagccgcctgaattacttccaccaccattatttccaccattgccattatctggtggtaattcatccggttttgataattcattttcaactatgtattctaaactttttggaagtgtaacttcaacatatttatttattgtagcttttcttcccttagttattttttgtgctaatccaagttttaatattacatttgaaccactttcttgtgtttctttactaacaatagaatagtttatcctaatattgtttaataaatattcaagtgcttcacttttctctaccttatacttctcagggtcatttttactagaaccagttccaccaattggttttacttcactctcattaataagggtaaatattaatccttcatcagagtttatattttcataatccactgttttgttgttatatgttacaatttttaaagctggtttatcgcttgttccttttcctaaaactttatagtcagcatttgagttactgccagatttttttacagatattcttcctatattcaatctatttccgtctagtaaatcttcatttgatgtaacatatatatctaatgtagttgtattacttgatttgttgtattctactctacaagtagcatttgcatttccactttttatctgagattttatattatcagaccaagtaatcttttctttctgctcattatctactacttcaacctcaccttgtacttttatactggcttgaaatgaatatactatgttttctactgagtccacagatatatctatagtatttactttctcatacgtttttgttccttgtaaaactggagctgcatatgcacatgtaacactaccagttacagctactgccatagttgatactgctatagttcttataaaagattttcttttactcattaacacccgtccttatctatcattaactaagtggataaatttacttatccacctagcttttatatttaatttataaattaccctaaacttatagttacatttatatactttgcttttaatatctactattttaaaactattctagtacctaatcatattagatatacaatgttagtattagtatttttacgtttttagagttccacctactatttatctctaacaatattaccctttactttattgcttacagttataaccttcttattactgacatcaatagcatttcttgtagcttttctagctttactattactatcagtaagacttattgtctttaactcatcataattcttagctcctacaggtacatacattgtatcacttacaaatctttgacctactggcgtatctccttgaaggtcattgtatctatatagttcagccttaaccttatcacttaaagaatcaaagttttcttttggcatatagtaaacccatgtacctttactgatttcacctaattcacctttttctggaacttctgcaaataaaagtgcttctccagatatagtcttattgtttttatctataagtagtggtaaattaaatgctggatttccactgtattcacctgtaataattattgaacctgctggaatcttacctgtttcatcttcacttgtgctagggtcatcactttgatatacataatcttctgctaactttccaattccattagtacgagtttggtctgcattattcattgtgccaatttctatattatcacctggaggtcctattatatctaattctgcaacttctatattagacttattgtttgagattagttttacatatctagcttggtatgtccaaagtttatcatctttattaaatgtaactctagcttcattatcttggtcttttcctccaccaactaaatcttgtccatattcaaaagttccttgacttacatcttcccagttctttttatcattacttacttgtatcttgtaattagttaaaggattgtatgttgtgctagtattctttctaaagttaaataatccttttaatgagaacttcctagtttctgcctctggttttgtatattttagtcctactataggtaatgtttctttcatgtctactattatatatggattttcttctacatttatatcagggtctttttgagggtctttgttccactctgctttacttattatctttcctttatatgtagtacttacatcattatcttttatattatcaatttcaggattttgtaatggtccatgtgagtcattttcagttctaacatcaccgtcagaaacagtatttgttatgaatgaccatgctgatttatttattttcccttcatctgataattttacagtgccaacttcaaattcttctgttggatttaggtgataatcatatgcaactaccttatatgtaaatgctctgttattaagaggagatatactatcagtaaatttggccttactatttccttttgcatccacaaatccaactgttctgtattttacctgtgttccattttcaccatctaaataatttccatcacttcttattatttcgtatcctagtatcttatctttatccttatctacatctaggtctatagatattttattagatttaactagagaaccactttgtattccatcagaaaaactagcacttactttagtatcttttgccatactagctatattttcatttaaaatctttcttctagcttcgtcatttacatattgtatctttcttgattctttttcatagttcttactatccattatactgtttaattctggtgtaatttctactccccatgccttaaagtaatctcttaaatctttttcaacaacacttgatgccattgctactagcatttggtcttttggtaaactattaattgggtcactacttgaaagtgctctgtattttcttgaaatctttgcatagaatgtatcattacttaaatcagcatctgagttattctttaacattgaacccgtaaaatcatcatcataagctagatgtaattgccataacattccaagcctttcaaatacattgcttggtatacctaagctatttgaagttacatgctcatatatcttatccattgttgaaccttcaagtcttgaatgtgtcttatcatcaaaggtctgagcaagtaaagcaagtacattgttactagtttcgctatatgtcatctttccaatatctgtaacatgtcctatttcatgacctattccccatccaaataagtttcctcctgtagcttttccactatcatctatttggaaaggtactccattcataagccctggaactgaaccatattctactcctacatgtaatccagaagcatacataaatgctccaataaacattctttggtattttatgttcatacgagattttggagccatatcatttttagttaagttaaattcattatcatctacagttccattaccatctaaatcttgtgttttaaatactcctctttctgagtaaactaaatccattatttgttcccatgcaagcatactattatataatctatctacttgtgtatttaaatcagcatttccttttgatattccttgatatacagctgttgcaggaacatttaatgttactttatcactttcaatatctgtagtgtttaacacaccagttttttctgaatattcatatgaattaccaatatttgttcctggataatatggttctccttttacagcatctttatatttagctaattcttctatatatgcttttatctttttcttagattcagaaactcccgcaggactcttatcatttattgttccatttagattaagatgtggtatcttagtagctcctgctacacgtacttttatatctcctccacttggagtatcttcagggtatcttatgtataaacttcctccacattctatatctaaactatgaagtttgcttaattgaattacattttttccagttttaagatttatttctccactcttatatgcaccagattctccatagtactgtgtatatatcaacttaggagtttttccacttttacttccaacatatactgttatttcatctcctgctctagcagctactcctaatgcctgccagtcattttgcatgcctaagttattggaatttacagtatactgtccgtttttatctttatattttcctgatttatttatttcttgatttacagtagttacatcagtaagtgtggctctatcattatataagtcttgagctaattttaattctctatcaataactgtcttatatggatgatattctccactagctttatctggagtatttaatctatcttttaattcagttattttttcttgagttacatcttcttttaattcaacttgtaggtcatccataaatagatttcttacatcatcttctatactgtcatactcataaaacttaagttctgatatattagacttatatgaataagatgaacaaacacttacttgtatcttagtagcagttattggttcttttaatctaaccattacatacttattattatttacagggtctgtctttgtttcaaaaggaacatcccccagattgtgtaattgaccattttcatcccaatatcgtatctcaaagtcatttattgtcttatcagaaacatcaaaacgaggtgtagccataaaagtatccatagtataagatttatcaaaagttattattggtcctctattcgttccctcagctgcattatatgttgggaatgtccaatgtgttgtgaagtctccatctactacattgaatttatcaaatggatttttatcactatattcacttttgtcatatcctgctggataaacaacatctacaatgtgatttgttggtattccaaatccaccattctccttaggagtattaattaatctatagttaggtgttgttggtgcatctatgctttcagttgtacctatatatgttttagacattccactagttcccaagtggttagtagctgtcattctaacttcatatgttgtgttatccttaagaccttctatttttaaacttgtcccacgaataagcttatcattgtattttatccaagacccattagagcctttttctttatagtacaagtcaaagtctttagcttgtttatgatttttccagcttacatcaagagatttaaatttacctttaacatttataccttctggtggttctggttttgtgtctggaacaacttgaaattctaatatgctatctgggctaaattgtataggtttatagtttgagtctacattttctggtactccatctaagttttctggcgttgcatctttataaccactagaccaatctccatttaaagattgtatgctaaccctatatagtccatatgcttctatatctctaacttctattgtatttttactagtttgtaattttttagtagataatacttttcccttactatcaattttatctagtataagttcgtatgctgatacatttacttcattattccaataaaaagatactttttcatttccaacagcagtgctagtcgatattttatttattttaggtatgttcatctctggctttggtatttctttatatacattgtttaaaaattcaacttttgatatttctgcaagatttctatcgtttgctgttgtagctgttatttttatagttatcttttttactgctacttgtttaccaagatttattactatatcgctattttgaacatctgtatatgtttctaatgctgccctactatatgtagatgttgtagagttatcatctttactgatattatccccttcttttggagtatcttcatctgaattaggtttatccattgatgaattttctttatcattatttttatcttgattggtattagagtttacttcttgtttatcgctattttcctgttgtttatcattattttcatctttattatttgaattattatcagtctgatttttattttcatctttattatttacttcttcttgatttacttcttcttgttcgttatttacttcctcttgttgctccttatcttttaagtttttcatatattctttattttcataaggaatctgttgaacattaccatcttcgtcagtaacctcaactattccttttgctggagcagtaccttctggagcttttatattgatgacttccatattaagtgcttctgataaagctatatccattactgctggtttttcctcagatatttcatcattttttgaagatattgtaactccattattttctccactaaataaattttctacattaccattaatatctacatcactatttccttttaattcaaccttacttgtatctactataggattggtagatactatactttctaggctttttgcatcttcactttgtcctaaatttttctgtacataatctaagtcaacaatatctacctttccatctctatttaaatcaaattctcttttatttgaatctatattctctaaaaccttattataatcactcttatctactttaccgtctccatttacatcacccattaagaataattcataatttaaaggtttatttttattatctacacttgctctattgcttaataagactctttgtgaataacttgatatatcaatgtctttaatttctttgttcttaaatccagctccagagacttctatattgtattttccaacaggtaaattattaaatacaatattataatatgatacattctcatctttattttttatttcacttctacttgcagataatttttttatagtatattctatattatctgtcccaatatttactgttcctgaatctttttctccaagctttattattccactattgttactatcatcttttaatcgtaactgcatattagtcatactttctgactcgctattttttattggcagtgaaaaatttaaatctacttcaagattcccccttaacttttctgtaactgatttttcaactgcccttagcttcccctctaatataggttctgcaaaaacatttagtggtgcactacacatagatactgctagtacacaagatattgcctttttcatgaaacaacaatcctcccttaataaatctctaatttttcatgaatttaaatactataagtttcagacaataaaaaaagacactcaaagagaatcttaattataaaataaaaagactttactctttttagcaactggctgatatggctttaaaagctttaatccctatagttttgcgtcattagatttccctaattttgccatttaattttcactactttcttacccattttatactatatttaaactttttaatacaatttttttacattaaattataaaaaaataacatttatattaataaattaatataaatgttattttccattataatttaattatttatatagcttccttacaagcataattttgtgtatattttcttattctttatatcttccataaaattcatgtgtagcatatagattcttatctcctgttatagctataccaaatcccattatttcataccctttatgcaacatattagttccttcttctggatttgtcttccactcattaaaaataaagtttcctatatcatctgcatctctatttgtatatacaggtttatctgaaattttatatttaattatattttcaccttgaactgctatatatccaggtttaatctcactccaatctaagtatttcaaaaaagtagaatatgaattttttccatttatcgtatgagataaagtcttcttatttgccattaaattagaccaatcatttgctagaccctctaatctgcttgctacagataacgctcttactccattatcttttctatactgctttgtaagagcatatactttaccctttattctctctttaaatgctctatcatttggattgtaatataacccttgttgatttggtgaagcttgatttatacattgcttgataacattctgatttatgcctcctagtacagtcaatttgtctgcaccacttaaaatactcttgttactgccattttcaactaaaactacaggagcattttttgctattgtagaggcgaccaaagcgtctgttaattgcaagcctttacttagataaaattctttactatttttataaaactcttgtataactatcttattagtttcaaatctatctgtgccacccaatctaatagaatttgtgctcttaactaattcgtcgctgattatttcactagaaccaagcgcataactctttaagcctgtcgtgtcaaatcccacactatttccatctataagtattataggtactccatctctagcagctactggtgatgcacttatcgcatctgcttctcctgtaaatccattggctataattactttatctattggcttaatttctttgattttttcagctatttttatacttgtatcaaatctattttcaccaaatattctttgtacaaccttctttttggataataactgattctcaacatttttacttattgttgattctgagcctattatatacacagtctttgctttgtttaatctttccatagttgtgtttggaatctgattttgctttgtcattaaaataggcgcatttaaggctccagctaaaccacttgcacttagaccatctgctaagctattatctgagttgattagtattgctgtattgtagttttgcttatctgctatttttgctgctgtctcatatctgtcattcccttttatttgctcaactgatgtcaacgcatttaccataggagtatttaccattactaaaaatagtgtaagtcctatagctaatatctttttactattcttcatattattttctacccccaatgtacttttcatattttttattagtactcatacttatttttaatcaaaagttacaattttgttaccatattttatatatgataccatagttatccatacaactcaaacaatatacctaaagtttttattctctataaattcaaaacattataatttattttatttaattaagttataagttcaaaataatttatgttagtaatatgtttaatcattataagaagtatctttttataataatttttgcaatatgaatttctccacattataatcaaaaaataaaataaggtatctcaatctaattctaaatgagacaccttatttttattattttatcttgttatttgtatattttataatatctacactatgtcttacatattaacgcattgtataatcatatattatctaaataaacttttaatattaattcctatatcttattagttcttagtaaataagtttattttttctgctattttttcaatagcgtttttagctattccttcacctatttgtactaacttagtagcattcttaagtcttaactcaactacttcttcttgtgatttagaaagttcttctgtagttaatactattggagcctttgaactagctgcaagtggtgctgctgtaagtgcatcaactaattgtccatttccacctacataaccatcttttgctacatatgctttagttgcacctgcatagtatttattgattactttagcattagtatcttttctattttctccagctaatctttcaactttattatttaaatctatatcaactaatttgtcttcaacttcttttgatacagaattttctccacccactatttctaattcttttccttttaataatttttcagcatttgcatctaattcgttacctgtaactattattggagcaccaaattgagcagctctagctgatatactcatagcatcagcttctccatttccacctactacaaaagcagtcttaaatgtatcttttaattgttttgctatttctaaagaagtttcaaatctatcttctccagaaactctctcaactttacttacacctaatttagaaagtttttcttcagtttcttttgatactttagattctccacctactatatatattttcttagaagatagattacttccaagtactcttaatatttcagcttctatttctgatggtagtgaatcttttttagataataatattggtgcatttttttgagaggcaagtggtgctgatgctaatccatcaactatagcatcttctccaactaaaattatagcttctgcttctccatctttgaatctctctttactaacttctactgctgttgtaaatcttgaatcaccagataaaacctctacttttaattcttttccatcttttacatcagttaatactttgtgtaagtctctaactaacttatggtttttacttgaaacacttattgtttctgacttttcatttgccttgcttaaaactatatcaaagcttgatttttctggtttatctttatcatcactatcttcttgttcttgagtaaggattgcttcattttcaaatgttaaagcatatccatttttaactttattaactatttctcttcctaatgtagttaatctaattccatcaaataattcttctgctgatatgtcttgtaaatctgcgtttttaactgttatcgtatgtaattcttttgaatctatgtcactataactcttttcataaccttcaaaagtaccttcttctgatgttatcacttttgagaaatctaaatgttggtctcctacatttaatgtaataacatttgctgaatcttttgctctttttacttcaactgtatttgtagattttatagttgctgttaacttgttatcagaatcttctgctaaagttgcattgtaagcattaactgcatctactatttcttgagcagttttgtagttttcaattttatagtcaactacttttccacctaacacttgatgtcctttatcttgaatagtaacttttaaactttgcccttctgttaaagagtttattttattttgtaattgagttgcattagttaagtttacattgtctacttttatatcgtaaactctatcatttacatttgctcctgcttttgtatcttcaaacttaacttctaatgcttttctaacctcttcgattagtttagcagaatctttcgcacttactgtgtaatttttatcaacattttctgtcacagtattgtctgcgaatattggtgctgctgcactcataactgtagcacctgccattactattgccatacttctctttttgttgcttaacatatttatgtcctccgaatattattttttattttttatattcgtatttcccacacataaataatattatatataatattatttttcaatatattttatgtgtttacataatttactaacacaaacactaataatatcttcttgaaccccttccccctacttagctctctataattatgctcaaagatagaaatccctattttatagtgattttctactaaacaatcatatactaacaaaagtattcaaactccatttttatatactactatgcactaatttttgctttgctcttattacttaaatatatatcactaaattaatatctacctccatatattaaaatatataacatattataaaatcatcataaattagagtttaaaattaaaaattattctaatacatgtaattgataaaaaataaaatataagagtagctactttaaaataaatgctcttatatgattagatatttttgcataattaaacgataagaaatcaaatttaattttacataagtagaatatatatttttatataataattgaaaataaaagaggatacctcataatgataaaagaatcactttgagataccctcttacaaacaactaaatcaataattttctatctttcacactcttgatttgcaactgtacaagaagttttacaagctgattgacaagaagtttgacactctccacatccaccttttgcagcactttgctttaaagtagcttgagataaagtttttacatgtttattttccattttcaacgcctccatttctaattgtttcctattgattatatcataaaactactttaatataaactctatttaaagttgacacccaatacgcctccaatgcctcctgctgctgatattagcaataacttataaatcatccctacttcaaatacaaacttttcttgtgctaaaaacacagtcaaaaaaatacatactatgtacaaaagtcctactaaaagtccatacataagtcctttttctttcatgtgttttgaagtgtaaaaccctcctatagctgcagaaatagtagttataaatgatgagaccatagttatattatctccaccaatatctgtaaatgtcaaaaataagttatacactaataaaacagccaaagttattatatatgcatatcctagacctttaaaaatataattagattttcccataaaaaaacctcctctcaaattaatatatattcgagaaaaggcttttaaattactaatttagtcttcttctatttcttcttttttagatttaacagttcctatagcccatttttcaaatggaactttagttctatttggtcctaattctaatattacaacatcatcttcaactttagctacattagctactattccacctattgtaatgaccttgtctcctacacttaggctacttctcatttcttttaattgtttgtcttttttcttttgaggtctaatcattaggaaataaaagattgcgattactactacccatagacctatactcataattatttgttgctgtggcattaatttttcactcctttgtaaattatactcttttgtaaatcataataaatgtttatataacaatttactttctctatctttgagtactattgaatattatatattaaaatgattataattaatagtgcaaaacctatatttcatatccatattttgcaaaaaattcatttctaaaatcaagtaatctatcttccattatcgcttgtcttatttgtttcattaaatttaataaaaagtgaagattatgagtagttattaatcttgcacccagtatttcatttgcttttataaggtgtcttatataagctcttgaatagtttttacaagcataacaatcacattcagggtcaagtggagtaaagtcttcagcataagttgcatttctaactactactttaccttggctagtcattgcagttccatttctagcgatacgagtaggtaggacacaatcaaacatgtctactcctcttataacaccttccactaagtcatctggactaccaactcccattaggtatcttggtttatcctgtggcataagtggagttgtatgctctagcacgtcatacataagtggttttggttctccaacactaagcccaccaatagcatatcctggtaaatcaatactagttatttcttttgctgattgttctcttaagtctttatacatcccaccttgtattataccaaataaagcttgtttgtcggtattattatgggcatctttacatctttttaaccatcttgttgttctttctaaagaattttttacatattctctatctgatgggtatggtgcacactcatcaaacgccatcattatgtctgaacccaatgcattttgtatttccatagctttttctggagttagaaaatgttttgaaccatctaagtgtgacctaaattctacaccttcttcttttatctttcttaaaggccctaagctaaatacttggaaccctccactatctgtaagtattggtttatcccagttcataaacttatgaagaccaccagctctttttataagttcatgacctggtctcatatataaatggtatgtgttactaagtattatttgtgaaccaatctcttttaattcttctggtgtcatagattttacagttgcttgagttccaactggcatgaatattggtgtttcaataatcccatgtggagtgtgtaatcttcctaaccttgcaccactctgcttacaagtctttatcaattcatatcttactgcgtacataaagttctccttaaccatatttatttctcattatttcttaagatatatttgtaataagctattcatataatttattgtctaaatagatttatcttcgtcttctttgttctgttgctccttaattgcttcttcatcatgaatactcattatattaagagcactcttgtcttttgttactaaaaacttttttatagcaaatagtcctgctatagctataactcctattaaaacatctatcataccttcatttttaggcagtagcaacatttttctagctattgcgtaaagtaatgcctcaataaatgctcctggtatatgaagagatagcattactacaagttcaacacctattactaaaagtaatatttgtgctaaaaaatcattaagctgactgtattgtactggattttgaaaatcaactatatatgctccccacataagtcttagaacatctatagttcctaaaaatactgctattagaactactactgctaaaacacgttcaaatataaaagcaatctttaatatagggttattctttttttgtttttgtaaactatgcattcattacctccctactttataatcatagcatctccaaaactgaagaatctatatctttcttttactgcctcattatatgcatttaaaacattatcctttccacaaatagcacttactaacattattagtgtagattctggtaaatgaaaattagtaataagtttatctaaaactttaaatttataacctggatatataaatatttctgtccatccactagtttctttcatctttccatcctcattacaagctgattctatagttctacaactagtagtaccaacacatattacattgtttccattttccttcgctctatttattttgtcagctgcttcttggctaaccatataatattctgaatgcatcttgtgatttaaaacatcttctacttttactggtctaaaagtgcctaaaccaacgtgtagagttacaaaagctatatctacacctttttcttttattttatttaacaattcttctgtaaaatgtaatcctgctgtaggtgctgctgctgaaccattatgctttgaataaacagtctggtatctttctttttcatctagtctagcagtgatatatggaggtagtggcatatttccaagttcatccaatatttcttcaaaaattccatcataaaggaattttataattcttgaaccttcatctgataaatctacaacttctccaattagctttccatttccaaaagaaaatttagtccctacttttgctctttttcctggttttactaaagcctgccaagtatcttcctctgttctttttaataataaaaactctattttacctccagtttcaagcttctctcctattaatctagctggtataactctagtattatttaatactaaacaatctcctggatttaaatattctattatatctctaaatactttatgttcaatattacctgtctctttatctaataccatcaatcttgagctagctctatcttctataggaacttgagctataagttcctgtggtaagtcaaatttaaaatcacttgttttcaatgttaaacttcctctcttaaaatttctccagctacaataatatcaaaaaaacaacttattttccacaatattaccataatctatcaagaaattgctatttttaacagacaccatatccacaatatatagatatttttccacgatatacatgtcttatccacaatatatagatacaatacacacaatttttatcgtgtttatccacagtatctacagatataattaccattttgtggatatatttgaatttttagccattttagaaatattttaatttaatgactcttttattttataaatactcgtataatctatttttatttttcattaggatatggaatttttaagtgttcatatgctaatggcatggctactcttcctctaggacctctatttataaatcctaattgaagcaaatatggctcatatacatcttctattgtatttctatcttctccaatagaagctgccaatgtatctaaacccactggtcctcctctaaatttttctattatagtcataagaagcttctcatctacaaaatcgagacccaaactatcgactcctaaaagttccagagcatcttttgccaccttatcagttatttttccatcagctctgacttgtgcaaaatctctaactctttttagtaatctatttgctatccttggagtccctcttgaacgttttgcaagttctaatgctccattagactgtatctctgcatctaagatgcttgaagacctaagtactatttttgaaagttcatcaactgtataataatccaatttacaaataacaccaaatctatctctaagtggatttgtaagcataccagctcttgtagtagctccaataagtgtaaatttaggaaggtcaagtcttatgcttctagcagatggccctttccctattattatatctaggcaaaaatcctccattgctggatataaaacttcttcaacacttctattgattctatgaatctcatctataaataaaacatcattttcatttaaattcgtaagtatggctgccaaatctccagctctttctattgcgggtcctgacgtaattcttaaatttacccccatctcatttgctattatacttgctagtgtagtttttccaagacctggtggtccatataaaagcacatggtctaactgctcatttctcgatttagctgcttctataaatatactaagttgttctttggatttttcttgacccaaataatcttctaaagtttttggtcttaaactgttttctatatctatatcttccatcttcattgtagaagttattatcctattttcatcttcaaaaccttgcatttatacccctcctctcgtacttttgaaaatctactttatatattttcaaatttacataaactccttaaatattgttttaaaatccaaatattataaaatccaaatactatttcaaggatttactcattatatatgtaagagctttctttataatagcttctgtattcataccatcttttttacatttttgaactgcctcttttgattccgacaaagtatagcctaaagctacaagtgcatctacagactcatcttgtgatatcaaggtaggtttttgtgataataacgttggttcaaactctatgttatttttgtctaccttatccttaagctctaagacgattctttctgctgtctttttaccaacaccaggagctttggataattttccaatgtcttcacttaaaatatatgctcctaactgtgctgatgatgcaaatgatagtattgaaagcgccaccttaggtcctattttagatacagatgttagtaattcaaacatcttaagttcttccctacttacaaaaccacaaagactcatatcatcttctcttacaattaatttagtatatatttttgtggcttctcccacttgtaaattcattattgtattggatgatacatttattttatatcctatcccattattttcaacaactatactgtctatataaatttcttctactgtaccttttatataactatacatacttaccacctatattctttagagttttttcaagtttgtttgaatgagcatggcaaatagccacagctaaagcatctgcaacatcatctggttttggaactttttttagacttaaaaatgaagttaccatctgttgaacttgtgccttatctgctctcccatatccaactacaccttgttttacttgaagtggagtgtattcatatacaggcttcccattatgagcacatgcaagcatagtaacacctctagcttgtgcaactgttatagctgtttttacattcttgttaaagaataattcttccattccaacttcatctatattgtaattctttactattgtatcaattcctttatacacaagttccaatcttctcgatatattcatatgggcaggtgttgtaactgctccataatcgattactttaaacttgctatttttgtattcaattataccatatccaactatggctatacctgggtcaatccccaatattatcattttttaaaattccccctaaaaataaaagaaataccaaaatgtatttctcataaaaacttatgttctaaatcattatatcataaataatattaacaaatcataaaatgctctatgtaaaatataaaatcaaataaaaaagttatatcaaagcaagattttacctcaatataacttttatatttattacaaataaattattgtatttttataggaattaaatgtgactacaattttaatactaatctatttaatattaaattatttattattaacttacttagtatttaacttgaaataatattaatttactattaacttgcaaagtcttctaatcttgaataggcctcttcttcagtatccataactacaccttttttgatttcatcttgaactgttttaggaagtgaatctactcttatttttgttttttctactaatgttttacttccactatcatcatatttatatagtgctatatttccattatcattttcaatagtatatttaccttttatagtagcgttcattgcttgtacatctttattatcactatatttagattctaccaatatgatttcatttttatccatactctttatttttttagttggatattcttttttaaaatatgatactatttctgattttgtcttatctaataatgactctggaactatcccagccattgtaagtgttctcttatagttagtttcattttcgccttcactttgaagccaaacttcacaatttttatttaatccaaaagcttcttttgacttttcgtccatattcgcactagcacttacaactttactagtttgaactccattattttttaatcttgtccctatataaactccgctacttaatacaaatactccaaccagtattaaggcagatattttccaaggaaataattcttttttcttcttttcaaacattgattacgcctcctttttctattattttctccaagctgtaagtttttatacaatttaggtaaattttagaagaaaatatatttatatttcaaattactctaagaatagatattttctaaaaggtagttttctcttaatggttatattcttgtaattatatggacataatttataataaataatcgtttaggaggtaataactttggaaagaataaactgtaatgtaattaactgttcacataacaacagccatatatgttatgcagataaaatttttataaatggtgaaaaagctcacaatgacagacatacttgttgtagttcatttttagatgaatctatttatagtaatttatctagcaacgttaataatagaaattgtgaggaattagtttgtactgtaaaaaattgtaaatacaacaaagatggtagcttatgtacacttgataatatattggttgctcctgaaactgatagagtaaacctttatattgaaacatgttgttctagtttcgaatgtaaatagtcatagtataaatataagggtgtcaaatgtaattaaactaacatagtgtagagtatctacaactattagtttgattatacttgacacccttatttattttaaataaaatttcattattataaccatgtttataatgttctaactgtaattaaatttgataaatttctataaattggtataatcaatatgtaaattgaatttagcaaattaatcataaaaataaaatatcgagtatatagtgttatactaactagaaatgaggtgcttatgagtacattttatattcaatttctttattttgtaatttatagctttataggatggtgttgtgaaactacatattgttcagttttacaaaaacaatttgtaaatagaggttttttaaatggtccattttgccctatatatggatttggagcattagcaatagttgctaccttgactccttttgtacacaatattcctttgttatttttgtttagtataattataactagcataatggagtattgtacgagctttattttagaaaaaatatttaatatgacttggtgggattattctaaacataaatttaatattcatggaagagtttgtctggaaaactcacttatgtttggtgtattatcattgattgtaatgcttatagtacatcctattgtggttgactttattaactctatctctaaaaatgtgctatttatatttgctatatctatagaaatttattttgttttagatttagttatcacagtccatacaattttacaattaaatggtaagttaaaacaaatcaatcttataattaaggaattaaaagataagaaagaatactacaaacttattacacaagaaactatagaaaacaaacttgaatctttagttgaaaatagactggatactttggaagatagatttgaaatacttaaggaaaaagaaaactatcgctatgctaaaaatcgtattgatgagctaaaaaataaacttaatactttgctgtctaaccacaaattacttcatagacgtataatcaaagcattccccaacataagctctaataagcatacagatattttaaataaaatcaaagaaaatattaaatcaattaaaaaagataaataataaaataaacacataagttaaataataaaaatactaatacataagattaaggtttagaatattttttgtaaaatactctaaaccctaattaatatactattatttttaatcttaatttataattttagtttattttacttttaacacagtaaatttaagcgtttaaacttcaatacactaatatactaccccatcaatatctcaactgattctctaagtgtgctaatctctcccacatttccagggaaaattatatatggcatattaggaaatttgctttctttgcctgtcatccatactggtataccaggttttatctgtcccattactgtagctttttttactcttagtgctttagtaccaacatcactagaagtaattccacccttagctataataaaatttggtcttacattaagcataccaattatactggtaactgcatctgatatttctacagaaatcataagctgtttatctttatcattcgtatccaagtcaaaacgctctcgtctagtataaacagcaacagttttaccactgcttattttttcctctacaacttttataactctttttacctcattttttagaccattttcctgaagaactaaatgttgattaaattctataaattctattggatatttacaatttttaagttcttctaactgttgggtagtcttattcacatgtgaaccaacaagtataattcctccattggtattaccttttgatactaactcatccttagtaagcatttccttatcactcactccgccaagtacttttgttatggcagcagcgcttctaaacataaattccttaccactatttactgctcgtataaacgcaattgtaaatacctttacatctacataatcggttgcatttacaataattttattgaatccttcagcttttttaagtttttctgttatagcttcaatatttagctctctaagttctttagaagaaatatatatcatatcactagatttgtactttccatgtgtcttttcttcacaccactcacctatatcagatgatttatatccaaaagatttatcctttgcaaattcagtcattcctgctggtacaagtatttctccttctttaacataatgtacattatctatagtaaacctaccaccttctttaaaaaatggcattattatttcaccctgaaataacttccccgataatctctctacttcgctttttaataaattagtttcaacaggataatgtcctctcatagtagaatcactacgacttatgattataaaatccttattaactttctttgatacatccacaatattctttgaaatttctttatgtgcttttgtagtttgagcaacagtaaatccccttgaattagtaagtataaaaaacatactatttttctcattaaaaccttgttccatactatccttatcccaatcagtataaacagaaatatcatgaactgtttgtacacctgttgggtcatcatctaatacaacaatttttctatctaaatgcttaagctcatctgcaagaagttcatttaatctgtcctcatctacttgtttaaaagtattaagtatatctatgctaattggttttacttctctcatttaaaacgcccctttatgtaatttgtatagtctaaatgtaatttatataatataaacaatagtttgttatttatagacctggaagtggtataattccatttataacactaagcaataaaaccattataaatgctacaactccagcaatggttcctccaattgtccaagagtttaaagtatctttaactgataatccactaaatcttgaaagtacccagaatccagaatcatttggaagggagaaaccaactcctccagcacatatagcaagccctactaaaactggtgacattccagttgccaaaattgtaggtcctaaaattgatgatgttgttactaaggctacagtagcagaaccttgagaaattctaagcaaagcacttaataagaatccaagcactacaactgatatactaagaccagacatagtatcaactaagaagttacctataccacttgcatttataacactgccaaacgcaccacctgaacctgttatcaataatattagccctgctgaatcagcagcttcaataactacatctcccataggtttatttatgtatctctttaaaaatcctattgccaccaatattccaagaagtattgctatgtttttatctcctataaatgcaagtactccactcattgtagaacctttttctaagaacatactaaatacatttgatataagtataagaagtattgggaacaataaagaaaacatagaaattccaaaacctggtactttagaagaatcatcatcttcaatttttatgctatcttttcccttttctaaatttttttctctatcattctcatcaatagcataagctggatatttttcaaaacgttttccataaatccatccacctataagaactgctggaaaagcaacaattatagaataaagtataaaactacctacatttgcatttacatttgctgcaactgctaaaggtcctggtgtaggtattacaagtgcatgacctactatagtcccaactcctaaggcacatacaaaaaccattagagatttcttagttactctcgaaacatacttaattataggcatcattataacaaaagctgcatccataaaaactggaattgaaattaaaaaacctgctgtagttactgctaaagcactgtttttttctccagtcttagctaacaacccctttgcaatagattctgttgctcttgattctgaaagaatatttccaaatattattccaagtccaattacaatacctatactacctaatgtatttccaaatccagtcgatattgtggttgatatttcatttataggcattctaaccataaagcctgtaattatagatgttatcagtaatgccaaaaacggatttactttaaatttaataatcgatacaagtaaaattcctatagatataacaaatgctatcaaaagtccatatcctgtaatcataatctttacccctttatcattctactttattatttatcaattttatttttcttttactatgataacttaacctcgctgtatttatataatctaatcctaataatatgtatttaattatattgatatatttaaatattaattattgtgtttttttatttcaacacctgccaacttttcaaaatactgtgctattccactatggtcatcttccaaatgtccatgtacttttaatgtctgcataatttctaataattgacttgtcataggtagcggtacatctaaattgtgtgctgtttgcattacattcttaatatctttcaaattaatagatatttttccacctggtttaaaatcacgattcataatcattggtatcttcgcatccaatattgtactaccagctaggcctcctcttattgccttatatactttttctgggtctgcacctgcttttgctgcaagtacaaatgcctcagaaactgctgctatcgtcaaattaactattacttggtttgtaagttttgtaacacttccactaccattatctccaattaaaatagatgagcttcccattatattaaaaaatggctctactttcttataaatttcttccttaccaccagccataaaagcaagtgtaccatcaatcgcttttggctcccctccacttactggtgagtctataaattctaagcccatatcttttaatttatttgcacacaatattgattctgtaggagtaactgaactcatatcgactactatacttccttcttttaaagtttttgccaatccatccatcccaaataatatatcctgaacaatagttccatttggaaggattgtaaatacaatatcacattcttgacccatttctaaaacacttgcgtattttgctccacatgatataagttcatccacagcagatttattaatgtcatacaccaaaagattacatccatcttttaataaattttttgccattggctttcccattattcctaatccaataaatcccaatttcattttataaccctccatatcttcacatttttgaaaacgttttttatgttttagagtatactacataccagtataccggtcaatataaaatataaaagtatttattttaacaataaatagtaatttttaaagtcatttattatatttagtcatcctatataagttttaatacatactattgtttttaaatataatatgctacttttacagttttgtatttttactaatttcaattagttttaattaatctgcctttaatgttaatcatacttcacacttcaataattttttatattttttaatcttatctgcaatttaaattgcaaaagattgaccttattttcactatgttgtatgcttaaaattatataagtttttgtatttttatattgtttaggggggtattattaagtatggctacatttaaaagattacaagaacaagcatatgactacttaaaagaattgatactatctggagaaatgatagaaaatgaaatatattctgaaacaaaacttgctagtgaaataggtatctctagaacacctataagagatgctcttcaaagacttagtcaagatggatttatagatataatcccaagcaaaggatttagaatccatcaaattacagcaaatgaaattgtagagatattccaaatacgctctgcaatagaagggttttgtacttttttaattacaagtcaatacaaagaagctagggcagtagaaactataagtaaattaaaacatcttttagataaacaaaaagatattttactaggtgataaaaatttaaactcatttgcagaatacgatacattatttcacacaactatagtttcatatgctcaaaatactgaatttgacaaaatgtttaacaactatatgtacagaataaaaaaattagctctcgattcattatcacatgaaggaaggcttgaaacaacattaaaagaacacacagatatttttaataatattgcaaatggatgtattgaagatgtttacaaaactactctcattcatatggaaactcctaaatacattaatttagaagatttttgtaacaataagtgattttagtattatactttcatttattaaaaatatatctacctcaaattaatttcctaatttataaaaaatattctataattatattgtaactaatactattctaaggagtgatttttttgaacgaaaatgttgtaactaatgaaactattgacaaagattatgctattgaagaagttcgtatggcatgcaaacattttggtgacttatatttttatttttccaaagtgttatttgaagagtttggtgaagataaaactatcgaaatactaagaaaagttttatttgaaaggtctgaagaaagagctattgctatgagagaaagagctcttgaaaatggagatgaattaattgcagacaatattattagcacaactgatgttccatttctaggatgggttcctgaatttaaagagttacattgcccttatggagcttcctggcttttaagatttgaggaaaacccttggtttaaaaaattcgcttctctttactgtgatgttacagatactactgtagctgaagtatttacaggagatacgtcccataaaataacaaaaaacattctatggggagataaaagttgtgaaagaatatatttccatgatgacaaggtatctgaaggtaaatatacttatggaaataaaaactgtaaataaataatttaaattttctatattcatatactatattttgtactttttcatataaatattataactagtcttttattttacttttgtttaacctaaagataatttacttttaatctatatgaattatcatataaataatcagaaagttatctttataaattatagttttagatttataatttataaaatatttatgttctttgtaaaattttttagaagcttctaatgttatgctataaaactatcttgagaagggctgattgaatgtttaataaaatatatgaaaagaaagaatttatagtttttcaagttaaaaaaggttatgtagtttataatactagaaagagttttgaagaaggtcatacacatttaaagcattttgaagcagcaaagacagctattgatttagcaataaataaaaagattcctagaagcaaagatggatattatctgactagtttaattcgcataagtgatgatggttattacattgataagttaagcgaattgttatatgttagagaacaaaaaggtaaaaaagaaaagtactgtaattctggttatcagatgtaacaagactagttgtgaattataagtaccaatcataaatacctttagtcttaaaatcaaagagtatcagtaaatctataaaaaaacaacttactgatactctttttaattatatgattaatatttgaatttgatacaaaattttatacaaaagtttatgttatctattctgattctttgtctgcaaattggctattataaagcttctcataaaatccacccttttccattaattcatcatgattcccctgctctataatacttccattattcataactaaaatcaagtcagcattgcgaattgtagaaagtctatgtgctataacaaaactagttctaccattcataagatttctcattgctttttgaagcataagttccagcctagtatcaacagaactagtagcttcatcaagtatcaatattgaagggtctgatataaaagctctagctatggttaaaagctgtttttcccctagagatatattagatgcttcttcatttaagaacatattgtatccatctggaagagtggttataaagtgatgaacatttgctacttttgctgcttgtataatttcttctttagtagctccaaatctaccatattctatattttcaaaaatggttccattaaataaccatgtatcttgaagcaccataccaaacattgaacgcaaatctttacgtttcatatctcttatatctactccatcaattttaatagcacctttctttacatcataaaacctcatcaataagtttattaatgttgttttacctgctccagtaggtccaacaatagctaccatctgaccactttttacttctgcatttaaatcttctattaaagttgaattttctccatatccaaaattaacatgctcaaatgtaacatttccttttacattttctatcttaactggattttcaacatcaggtatttcctcttcttcgtctaaaatttcaaatacacgttctatagctgcaaaagaagattgtattactgtagataactgagtcatttgtgaaagtggctgatttatctgccatatataacgcacaaatgcttgtaaatttcctactgttatccctccacttactgcatatatagaaccgacaactgccacagctgcaattccaaagtaagttactaatgaaaccataggattcatcatacttgatataaattgtgccttaaatccattttcacaaagttcttgatttacttttttaaattcttttatagaatcttcttctttaccatatagttttatttcattaaatccagtatacatttcttgtacttttccatttaattttccaagagcattttgttgcaatgaaaatctactttgagatttttttactacaaatttagatacaaaataactaattggaattataaaaagagctataagagccatatatatattaattgtaaacatcattgaaagtgccaaaattatgactaagattgagtttacaatttgcataaaactctgttgcaatgcatttgatattgtatctacatcatttgatatacgacttaatacatctccaaaactattactatcaaaataactaataggcaatcttcttattttattttcgacttcatttcttaaatctctcattgtgttttgaatagcattcgtaagtagaaaacttgaagtatacgtaaaaattgcattagcaaaatatatacatgctaaaatcaccaatatttttgttacataatcaaaatttacggaagcccctggtactccttttgcgatactaattacatctttagtcaattgtgttattatcaatccttcagttttaggtgcaagtgcattcatagtagctgctgaaattatacatataatagctataataaaggaaaatttatatttctttacaaatggaagaagtctaccaattgttttcttaaaacctttagactttttcattattctaattcctccttttttaactgagatgttgcaatttcatagtatatttcacagttttttaataattctttatgagttcccattccgacaacttgtccttcattgagtactataatcttatcagcatcaataatagaactaattctctgggcaacaatcaatacaattgcatcttttgtttccttcttcaatttagcacgaagtattgcatccgttttaaagtcaagtgcagaaaaactatcatcaaaaatgtatatttcaggtcttcttataatagcccttgcaatagaaagtctttgtttttgacctcctgatacatttgctccaccttcactaatcaattcatcaaactttctaggtttttttgatataaactcatatgcttgtgcaactcttgcggaatattctaattctgactctcctgccttatgtttcccaaatctaatattatttgctatgctaccagtaaaaagcagtgatttttgaggtatgaatcctatcttttttcttaaagcttttaaatcatattctcttatatctactccatttatcttaatgctaccctctgttacatcgtaaaatctaggtatcaagttaattagagtacttttcccactaccagtacttcctataaaagcgactgtttcacctgtttttgcagtaaatgaaatatccttaagtacagaagcttctccatctggataggtaaaagttacattatcaaattctatgatacccttattttcagtatccttaattccattttcaggattttttatcaatggttcttcatttaaaagttcttttattctatttgcagatacctctgctcttggatacataataaataccattgaaaaaagcataattgaaaacatggcatggaaaagatattccaaaaatgcaaccaactgtccaacttgaagctctccaatatttatcttctcacttgaaatccaaaatacagccaaaacagctatatttaatagtaaaaagaatgctggttgagtaattgacataagcttaaatagtttcttagaaacattagcataatatgtatttgttttttcaaatcgctctgtttcataatcatcatttccaaaagctctaattactcttattccagttaaattttctctcgatataaggtttaatttatctagtcctttttgttgttttgaagatattgcctgagatacttttgctattattgctactccaataattataaaaggtactgatatagccaatactatagaaagttccacacttgttctaattgtcattattatacttatgatgaacataactggagttaataaggcagtccttagtagtatattaacaaattgttgaatttgaaatgcatcattcgttgttcttgtaatcattgaagaaattccaaatttattgtattcagtatgtgaaaattcttgtgatttctcaaatatgtcatttcttatatctctggttacacttgttgataccttagcagaacaataacccaacaatatactacctacaacccctataatagaaataataacaatcactattcccatttgttttatgtaagctatattctgatttgcaataccattgtcaattattttagctattatagttggaatccccaactcgactaatgcaaaactaaatatagccagtatgtttaatactattaataacttataattctttaaataacttaaaattaatttcatatttttctcctttcttaatttttgagatagtgtaatcatgtaataatactaaatttataaatgcttaattttataaaaaaaggagaaaagagttaacgcactctcttctccagcatattctttttaatacaccctccgacaagtcgcttatatgttaacatatttgacaagtaatgtcaattcatatagctaaaagtcttttaaatgcttcatctcataacattgtaacaaattggcatgtaatttatttttgttttttactgtattccaattttacaagttctccaatattactaactttcttaaaattcaaattagtcttatctataccagacttaaatagtgaaatccctctccccaatattattggcaatatatatatataataatcatcaattaagttatctttcataaataattttactatatcgcctccaccaactatccaaatatcttttttatccttcttttttccaatttgctcaattaattttttaggttctaaattagtatactttacattctccagttgtcccattaattgtatttgagtatatatagcattccttacccttatagtaccattcatttgggcttaattcatttgcaatctgtacatatgtggaatttcccataatgatagtatcaattgtatcgtaaaaagtattataatcatcttcctgctcattcttaaattctgaagatatctcgtctaaaaaacttacactgccattctcttcagctatataaccatctaaacttgtggcaatataaagtactacttttctcatgtttactacctccaacatttatagtgtgattattctatgtaaacatcacttttttactcattcaataataccctattaataaatcctcaaactaatttaaataaactttgcataaaactaaaaatatattatataaataatttaaaatcacactaacttattgaaaattctaattattacaaataaatattgctctctgttaacgctagttttataatataattataagctattaatattataaagccgatattactaatataataattatagttaatttacttttgttgaaaggtggtaaataacatgaaaatttcagaagtcgctactccaaattttttgctagatttagaccagttagaaaagaatatagataaaattcaacaaatttgtacaaataataataaacaactttggcctatgcttaagacacataaaagtacttacatagcgagacttcaaaaaaatgcaggtgctagtggttttctagttggaacacttgatgaaggtgaagctctgataaaagcaggttttgaagatattatgttggcttatccttacatgggagaagtaaatataaatagaattgtgactatggcatcaaaaataaatttaatctgtgctacagataatatagaatgtgctaaggcttatagtgaagctttttctaaatcaaaaatagagtgcaagctacttattattgtagattgtggcttacaccgttttggggttgaaccagaaaaagtggttgaacttgctactgaaatttctaagctagaaaacatcaagattgttggtataagttcgcatccaggtcaagtgtacggttgtagttctccagaaggtgttccagatgtttgtgttcaagaagattcttctatggagaaagcatacaaagctctaactgataatggatttaatatagaaattgtcgcttctggtagtactccaacagttgaagctgaagctgcttctaaaactataactgctgtaagacctggaaactatgtatactatgatgctatacagataggtttaggttgtgctactgaagatatgtgtgctcttactgttgtgtgtactgtaatctcaaaaaatagcagtggatattatttaattgattgtggaagtaagtgccttggacttgataaaggtgcacatggaaatagtagtattgttggttatggtagggtatgtggacatccagaacttactattgattcactttcagaagaagttggaaaaattaaagtaaatggtgaaactgatataaaaattggtgatagaataagaattatacctaatcattcttgttccactgcaaacttgacgagtaatttattaggttttagaggagatacaatagaaaaagtcatagaagtagatattcgtgaaaattcaaaacaaatcatcctttaaaaatatatttattttgatattaacatcatgaaagtatatttttcttaaaattattgttaataactaatgttaatgttggataaataaaaaacataaattctagaaatataaatttaaaaaaagaggctgtctcaaaattggatatgtccctgtcaagtagacagacttaaaaaaggctatctttatgcggaatgagttcgatattcaatcggactcattccattttttaattgtattctttcattattataaaaataaatataatcatttattagactaatcatttcctttggatctgtagtatcaattaaatatattaattcagatttaaaatgactgaaaaaactttctataggagcattatcccagcagttgccccttcgggacatagattgtataataccattatctttaagccttttagagtaagatctacttgtatattgtgaaccttgatctgtatgtaaaatacaatctttagctaaattcatatttattagttgatttactgttttattaactaatttagtatccatttttgtacttatctcatatgccactatttcaccattaaataaatctttggctacattcatgtataagaattttttaccgataggtatgtatgttatatccatacaaattttttctaatggttgattagctctaaattcacgatttaatatattatcatatacctcatatgatttaaacttacgtctatatactttctttctaataatagatttaattcctagttctttcatcaacctatatactttcttatgattaatagggctatcaagtattttatttaaataagtacaaattctttttctaccgtaagttcctctatattttttatgtatttcaattatataatccttaataattctatctttgatacccctatcggaagattttttagaataacttagccatttatagtaaccgcttcttgacacacctatcaacttacacatactagaaatactatacttcctagacataagtttaattgttttaaatttatcgcttactttgacttgtccaatagggtacttaacttttttaaaaattcattctccatgcgtaagtacttcaattcttcttcaacagatttaaattttctattatcattttctagactaatatttttaaatctgcctctagtttcctcattaaatgcagttttacctttatttttataatcttttatccagttttgaacttgtgttttgcttcttatattcagcatctcagcaattttgtatgatgagtatccttcttttatatataaatttacagcttttagtttaagttctttgctatattttttatgttttttagacatagaaaaacccccttagagtatacgctttttagacttattataatagccttttatttaaatgtctactataaggggattatactaaaatagagataagcctctctttcattgttgaaattatgaaaatatacttgatttaataccaaaagagtatctcatgaactaaaaagttcattttgagatactctcttcttttttaattaatatacatattaattactatattagtttattactatatatcaattactattcattaattactattcatcaattcttatatatcatttataattaggttataattttatgttatttacattaatcccataacagtgagtaaaactcttactatcaacatccccactattgcatcaaatataggaactgccaacagtaacattctatacttagtactggcatttgctacaagcactattctggcataatgaccaactagagtacccattaacatacatggcataattaatatggttgcttgtggtgcagtgattagaccttgtgcaaataagtttgcagctgtagctgctcctgctgccttagcaaagaatgctgctatcaaaactacaacagattccccaggtagtccaaaaatacccattactggaccaaaaatatttcctaaaatatcaactaaaccagttaattgtaaaaactgcactattacataacccattatcatggctggtaatatctgttcaacacctatgtaaaaacctttttttgctccccccataaatatctcaacagcagttttcttaggtttactatttacaattgcatttccagtattttgttgactcatactacacagcctccttagccttattctttttatttcttacacctatgattaatctaactagattagcaccaagtattttacagaatatctctataaggattattggacctaatgccaataatgctattggtaaaagtggagcttgagtatttattgtgttcagtataacagctgaaccagcatattgatatgctacaaatatagttctttcatcatctgttatttccccactttcaaataattctttcgtcattattgaggctacatctgaactagtaaatgaagatacaaatgctattcctgctattccaggtataccaagcagaggtctaagtaatggattaaatatctttgatgctgctttcattcctcccatagattcaactacatctataagacctacagcaaaacagacagttggaatcaaagtcagagcaaataagaaaccatcttttgctcccgttcctcctttacccataaagtctacaccatctgcaatagtaccaaatgaacctgtcagattagcaaaatctaatgctttaaggaagccttgactatctttaaatactcctgaaaataatactatcaatacaaataaagataaataccctttccatgttaccttattatctccagctgttacatccatataaaatccccctttatacctcaaatttatctaagtttaaaataactgtagaaattaatttcaccctctcaaacatagaatctactactgcatattctcttgatgtgtggttccattctcctcttacaccaaatgaacagattgtaggaacgtttgcaatagttaaataacttgcatctgaactacctccaagtctcttagcatttaattctccaaatccattttctcttgacacttcatttacaaatgtatgaaatctcataacatcttctgtagtttcaaatggcatcatttcacttataaaattaacttctgtagaagttccttctatgtaagtttctttacatatctctctaacttgttctttaacattctccatttcttctactttttcaaatctaaggtctacttttatactacaatcttctggaatagaattttccactcttccacccttaatcacacttacacttactgtagttccaacatctaaattagtcaatttttgtatgcgtagtatcttattagccatttcttctatagcatttcttccaccttcaaaatcattacctgcatgtgtttctacaccttttacatgtatattacatcctattcttccttttctacctatacataaactattatctactaatccagtttccatattaaaagcacaaagagcaccttttgcttccctcaatataacatctgcaccagttgaatctttatgacctatctcttcatctccagaaaatactatttttattggtctttctttgtatcctattttatttaaagctttaataacgtataaagagattattataccccccttcatatctaaaacacctgggccatatgcttttccttctattattttaaatggattctctccaaatgtacctgtttcaaagacagtatccatgtgtcctgaaaaaattatcggctttttatctatattagaaccaagtgtacctatcaatgtattaccattttccccaacatctactagttcacaatccaaaccttctttttcaaattcaagctttaatctctcagctaacttgtttacactttctttacaatgtgtataactttctatattaacaatctctttccataatgaaactatttcttctctattctcatcaacaaacttagaaatttcatttaaatatgtattcataatcttctcctttattttcaaataaaatgtatttctttcctaaaatctaagtttattttaggaaatcttaaaagactagtccttaattacaaaatagcacaattattcttgccagtcaacatatttttcagtcttttttatattttctgatttttctttcaattatccttttgtaaaataaattgacgcgttttatctactattataaaatgaggttataaattgattgattagttacaatactctcgaaattttaaaggaggttttatgaaatataaaattggttttttgacaacatcttattttatgtcagataagtttaaacaagctcttaaagaattaaatgatacttgtgaaattacatttattgagcttaaaggggagaatccttttaataatttacctaatatatactatgagcaagtagataattttgatggatttgtatgcagtggtatagttccatatagtgaacttataataaatataaaagacataaaagttccattaaattttttaaagcttgatgaaagagatttttataaatacttattcaaattattaaatagccaaaaagatattgactttacaaaatcatttatggattttttaagagaggacaacaattattatgatatatattcattaatagactctaataaatgtccatatacaattaaagattttaatatccctcaacctgtatatgactttaaaaaattaaatgataaattattggaaatacatttagacttattgcgagataataagattaacctttcttttactagaaattacatcattagttgtgaacttaataagcttggatatgattgtatttacatggttccatctacagaatcaatcctgaatacatttaaatctctggtgaatgaaataacattacaaaacttagacaaaaataaatctgcaacttgtatagttacagtaaatagttcagagtacataaatgaagatttgatatttaaaaatgatgagatacaaaatcaaatatataacactatattaaattctctatcaagacatggattctatggagttcaggtcaaaaaaaatgatatgaaaatagagatacacactactaaagaaatattaaacaatatgaccaataactatacagatttttttatttcagaagatttaaaagaaattaaatatagcttaaatataggttggggcattggaaatacaaatattcatgcagagcaaaatgctcgtcaggctaatggtaaatctgcttctttgaatggaaactgtacttttatagtaaatgatactaatgatacaataggccctttatattcaaataaaaattctaataatattgaagatagctcaatagccaataaagttgcttcttttatacctctatctaatacaaatgtatctaaaatcatgtgtatgattaatgatagaaattcaaataatgtgtcagcagaaatattagcagactatatgaacataactcttagaagtgctaatagaatattgagtatcttatataaagcaggaattgcaactattgtaaatacaaaactcgataatcaaagaggaaggccaaaaaaaatatataaagttgatttcttatcttttctaaataagatgcagaaattaaattcttaatatttaattttttaataaaagcaatgtattttctctaattttaaagaatcaaaatgtttaaattttattagaatatacaactttttactttaaaatacctaaaccttttatcagtgaaataaaccataatatatcgtagcttattagaaaaacaaaataatttcatatacaaataataaaatagccactacaatccataatttgcagtggctactttttacactatcacttattacttaatttttaaaaattaattgtattttttaaataatttatacacacctattatcagtaaaacaataaatacaagtatatctataaaaataattattgtaacatgtctggcaatattgtaaataaaaagtatagagaatatttctatagacaacgctacaaaacacataaaattcgttaaataatctgcaatagtatcactataaaaagcatgtatttgtaaccatctccatataaatggacgtaaaaggattctgaatacaacacaaatgacagggtaggcataaataaattttttatctacataattagctacaccattattccattggataggaatttgaggtggcaactttggaaatactgttattgcaatcaacaaacaagcaatagtaataattccccaggtaattttccctccccatatatataagaaacttacagagtcaagtttaaaaacaggtttgtttttattccagtattctggcaactcagttatgtattgctctactttcaaattcaaataacttagctcatcagattctaacattttattacacatagtttttgcattttctaagtctgatattttagtttcgagaactttctcctgtttctctacaacttcaactaaagatactttctgtaatataatattacggatatcatcaatagtaattcctagtgtacgtaaatatgcaatttttttgatgtcctctacattttcatctgaatattctctatagccattacgctcattacgaaggggtttaattaaattctcgttctcataaaaacgaatattagagcgtgtcaatcctgttttttcttcaacttctttaattgtcattttaaacactacctctctattctattaatttacaactataatatagtcttaaatattttcactctataaaattgtatatttagtatatcttaaaatcaagttaattatcttttataaattttcatacaataatatctcctttcaataatatctctttttctatatttaaaactatcttattttctataaaataatgtataaacaaggtttacagtcaagtatttttattatttttttgatttcataaaaaaaagcatagcaaatcatttgctatacttttttactaaattatttattctatatcttatatgaacttattgtttaactactacacaatactagctttaatcatcatattttttgcaaacatactggcttcatatatttcttgttcatctggatgactttgagattcctcatggttatttaattgttggcgaatatgttcgttgtcaggagaaagttttaacatctctttatattttgctttcaatccttctgctatcttaccttgacatatgaatgaacctaatatttcattatcttttgggataattgattctatcttttctattatactagctccataacttccttttttacttgctcccattgttccaaatagtgctatctttttattgtgaatattttcaagcacttgttttgaatttttatcacaaattcccttgtccacccaatagcctaagaatactatatcataattttcatagtcaataccatactgaacctcccatgactaaagtcacagggttcctgcttcatagaattttgcatactaaaatatgtcttactaattctccacaggctatccccgtagttcctacggttcttacataagttatttattttgaattgttattagtcttaatccttcttttaatatatttatacttgcatttatatctctatcgtgagtttcattacaactaggacaaatccattctcttatatttaaatccttaacttcctcgtttttatacccacatttattgcatatttgtgaacttgcaaagaatttacctacctttacaatttgtctaccataccaattagccttgtattctaattgacgaataaattctgaccatgatacatctgaaattaagcgagatagtttacgatttctaatcatattctttacttgtaaatcttctatgcaaataatatcgttctcttttattaatttagtagataatttttgcagaaaatcatttctttgattagctatatgttcttgaagtcttgcaacttttaatcttgctttattcctatttaaactaccgattgtttttctcgataattctctttgtaatttagcaagtttgtttaatgacttcttaagatacttaggattttctataaattctccacaacttgagatacaaaattctttaattcctaaatctaaacctatctgattgttagtattttcaaatgcttcaatatctacatcagtacagcataatgatacataatatctaccacttggttctttagatatagtagcattaagtattctccctttaggtacttgtttatcccttactttaaccataccaagtttaggtaattttatatgttgaccacaatacacgatatttccatttgtaaagttagttttatatgaaaatctattaattttctttgatttaaatttaggaaatcctgctttttctttaaagaattttttatatgcattatctaaatcttttaaggcgttttgtagtgaaaatttgtcaggttccttaagccattttaattctttttttaaattggtcaaatcagaactacactgtttataagtaaaagtttctttatcgtttttataaacttctattcttttagcaagatacttattatatacaaatctacaacatccaaaagttttgttaattaactcttgttgttttttatttggatacattctaaacttataagcttttttcacttctatcacctcacgttaattgttttttgatacactttttaatgattttatcatatttaatatattatataatgctgtggtgaacaatttattaatcacctatcataatattaacaaatgtaattatttaaaacaattatttagaaggttttatatttaattttaaataacatatttaagaaccgtaagtcttaacttttatcatttttgaggttgtcgttcacataagttcgctactacctatgcagttctcttatgaacttcttacactttcatgcaagcacagactatatcttatccttcggcattatccgttaaggtctacccacttccactaccgataacttgtagtgtacttccctcaagaggaatagtcgttgaagtttctcctattcggagtttacctgctgattgcccattttaaagtacttaggatttaaccttataccatctaaccaattttttctactttcgtaactttcacacttaggtttatttcatccttatgttttagtttgattagctttaggggtttccagcaattcaagtagtattggataggttctatcctatctctacatataggtttccctatatgctgactattttagctactaactcatgactaaagtcacaagtgtgcgtagctattttttaatcaactaattcatttacatctttaatgtctttttcttcttgaatttcatcatatatagcataagcaatctttttagtatttccagttaaacttgaatataaaactaaacttttcatgatgtctcctcctctttatctaaatacttatctaaatcaccaaaaatatattaaccttaacaaattatttatttttataaagatattctaatctagtatacatccaaactgagagcgtgtttgtaaagcatctgcacacttcttattacaataacagcactttttaatctcatctactcttccatcttttactttctgtaaccaattactatctgctagtaattgtcttgacatagaaaccatatctactctattatttgaaataatactttctataaaatctgggctagacaattttccaaccccacatactggaagatttgtgtgtttctttacttcatcagctaaatataaaaaacagccttcatctttaaagtaaggatgattattggttggtatagtatcttctaattttgaatgatttgcaagtgttacatgaaaactgtttacacctagggattcaaattttttaacaaaatactcaacttccgaaagtaaaactcctgcatttccataatgaggattttcttgtcttattgcaaatttatagtctattggaatgtccttaacttcatctcggatactactaattatttcgcttgcaaatctacttctattatcacacgttccaccatattcatcatttctattattaaatatacttgatgaaaaacttcctacaagcctatcaccatgaatttgaatcatgtcaaaacctgctttttttgcattcaatgctgttactttaaataaatttataatatttttaatttcttctttgggcatatttgttatgtaatcttttactccgtcattcattattttttttatctcatcatgtgaagtaattcccatcttcatagtatctttaattaaattaacatcataatctgaacaaaatagttgtgctgatacctttgcaccagaattgtgtatttcatctacaattttcttgtatttaatgactccatcttcatccgataggcttatagctaccttatgaaaactaggtctaatagatacatctcctagagtaatcagagctactcctgacttagcaatatcagaaaactttttaattttttcttccaatttaagacccatgcttgtaggtgcaaaagatactctattttttaattccaaatttccaattttaattggttttaataaattacaatacatcctatccttcctccacagctgtttttatatcctttaccacatgtaaattctttaccagttctttatattctgtatctgagaactctttttttatgtggttatcccactttgaaaatatgttttttatatcccctaatacttcctcacccttatctgttactctcaactgaaaagctctactatcattagggttttggattttttctatgtatccatcttgttctaacctagatatagttcttgttgtatgagctttatcaacttcaaattctgtagaaacatcattcaaagaacaattcctatttttattaatataaattaaatagaaatatagaccattcgtaagtttatatggttttaaacatttttcacaataaagtttaaagtttttttgcaagttacaaataatatatgacaaactttcatactgtaaatttttaaaatccatcttaaatttcccttctataattataatatgtttgactatatcaactatattatattaaacaattaatatagtcaagaatattttattctctaaatctatgttttattaattctttaaaaaactattatataaaataatcatgataaaattagaaattggaatttttaatatgcactgtacataaatatattttatataaaagtttatattttcaaacaagtaatttttcgaaaattgtctaaattcagtaaaaatatggtaatatatacataagcaatataaatctataaaaaggagtgttacatatgatatctaataaaatgcaaactttagttgcaaatagttctgttataagagctatgtttgaagaaggaaagaaactttctgatatttatggtgaggaaaatgtttttgattttagtataggaaatccaagtgttgaacctccagagactattaaagcagttataaatgatattttaaatgaagaatctccaaatttagttcatggatatatgaacaactcaggatatgaggatgtaagagatgctattgctgaacatataaataaaaaagatggattaaatcttacaagagaaaatttaattatgacttgtggtgctgctggtggtctaaatattattttaaaaactcttttaaatcctggtgatgaagttattgcttttgcaccgtattttggtgagtataaaaattatacagaaaactatgatggaaaattaatagaagttcctacaaatatagagacttttgaaccagatttagatgctctaaaaaatgctattactccaaaaacaagagctttaataataaacactccaaataatcctactggtgtcatatattctgaagaattattaaaaaatcttggagaattattggattcaaaacaaaaagaatttaatacaagcatatatctaatttctgatgagccatatagagaaataatttatgatggtgccaaagttccttgtgtactaaaatactatagaaattcatttatagggtactcttatagtaaatcattatctctacctggtgaacgtataggatatattgttgctaatgggcaaatggatgattttgatgatgttatgtcttcattaaatgttgcaaatagaatacttggatttgtaaatgctccttctctttttcaaagggttattgcaagaagtttagatgcagaagttgatgtaaatatttataaaaagaattttgaccttctatataatagtttaatcgatatgggatattcttgtgttaaacctaatggtacattctatttgttcccaaaagctccaattgaagatgataaaaaattctgcaatgatgcaaaacaatttaatttattattagtaccaggttcttcttttggttgtccaggtcattttagagtatcatattgtgtatcttatgataaagttaaaagttctttaccagcatttgaaaaattagccaaattatataatttaaaataactaaatcaaagtaattcaaataattaactaccttagtatagaatacttacattctatattaaggtagtttataattttatgtactatattttatacataccatattattccaatatgcttgaatattcttatctatagtactaatataaattacaaggaggtgtttgacttgaaaaaaggttatgtttatataatactgactaccttattttttagttcaatggaaattagtctaaaaactgtcactaatgactttaatcccttacaaataactttatcaagattttttgttggcggtttagtcttactaccttttgctgtaaaaagattaagagctcttagtctttctattacaaaatcagacttaaaatactttgcatttttaggttttatgtgtgtagtagtaagtatgtcattgtatcaactggctgttctaaacacaaaggcatctgtagttgctgttttgttcagttgtaatccagtctttgtaatgcttttagcttacttaattttgaaggaaaaaatatataggcacaatgtaatttcacttatattagaagttcttggaattatagttataataaatccattgcatacaaaactaactcttagtggaatattcttaacattatcttctgctattattttttcaatgtatactgtatttggtaaaagaaaaaccttaaaatttggtggaatagttgtaacttgctttagctttatatttggtagtttggaaatgttgatattggttttactcactaaaattaattttatcgcagatatattaaataaaaataaacttcatatatttgcaaatatccctatttttagtggatataccttacacaatatgcccattatgatttatgtattcgtatttgttacaggtgttggttatgcactttactttatggcaatggaagctacatctactagtcttacatctttagtattcttctttaaaccagtactatctccaatactagcattattaatacttaaagaaattatccctataaacatggttataggaattttattgatagtaattggttcaataatttctattatacctacgataattactcaaatgcataataaacacgttgaagccttgtataaggagtagtaattgataatctatcaagttatacataagacaaaatttattagatttaaacgcaatataaaagagatgctattataatagcatctcttttatatttattttaaatttattaaagctctatttagctaggttttgcaaaaagctataagtttgtggacaagctgattttaacttactatttgtatcttgatttaaatagtaatatgcaaatgcttctgcaaaaaattcttctggatatacacctaagtagtttacattacctaaagaacgaccttctttagcaaatatttgtttgaattgtgctgatttagatatatcatttaatactatatggtctattgcatgtgctgtttcatgtaattctaaatttattgcatcatgccctttacctttgttactaaatcctattctaagagctactgtacttccacctaagcctggaacatcatcccaagtttttccagtaccttcccatcccttaggaactacaccttttaaataagcatattctttttcatctgttaactttccacttaataattttatttttaagttatcttgctttaatacatttaaatactttccatctatattagctaatctatttaccatagcattagcttcgtttttattgtaatttccagttggaaaaactactatttgactaagtgtgtctttattttgttgtatagtagtactatatgcatgtgcacttactggaactgaacttattaagaatattgatattatagctattaataattttttacttggtctcatattattccctcctttgagttaggccgggagtaataaatttcaaaataaaaaagatacccaagagtatctttgtatatacaaaaagaaatttttactcttttcggcaactggctggcatggtttactaaactttagcccctatagctttgcgtgactaggtttccctagttttgcctcatttaattttatatctatattatagcttatatctttttaattgtctatatccctttggaacttttttctaaaaagttattatttttttacataaatcttcaaaaaaaaatatcttctaacaatattttcattattaaatattgttttagaagatattttttaatataacttatattttttataatgttagggtctaatttgtatttttatttcttcttaatacgacaagtcctacaatagctcctataactaaaagtatttctccaataattgtagtactatcccctgtttttggtggtactggtggatttaccaaagtatcatctttagctttattatttttttcttctgacactgatggctttaccacttctggtattggaacaatctgtttaacaggagtttctatcacctcttctgatggtggtactggtggattcaatatctctggtattggaggatttattatatcttctgacggtggtactggtggatttataactatagtatcctctgtatcagatggatttgatggtttccttggtttatctgtgcttggtggcactggtggatttactattggttcatctgtatttggcggtacaggtggatttactggtggattttcttgtcttatgttttctatatttccgatatctactattctaccaatatctttattaccaatttcaaccttaattttatccttcagtttttcatatccacttggagccatcacttctactaaataatatattcctggtttttttacactagattgaattacaccatcttcatcactaactaaatccttaactactatatttccaaatgcatcttctaaattgaacttagcacctgaaagtacatttttatctaaagcatccacttttttagcttcaaaagcataaccttgcttagtagtctctactcccggaggacttgaaccattaatctgagccacattttgtatagtctccccaacttttacatttgtgaagtctgcatcaaatgtaacccagctttgcacaggttccccttcttttatctgtttaaattcgtatttatttactaatcttattgtattttttccatctccagcttcttttttaagttcaagattatcagaatattttatattagatatttttagagatgggtttacttcatccaaaagatttacttgtcctgcatcataaaccccataagttgacatattgattttgtatttaacaatctggttatcactactatttaaaacctttttatcaacttctttttttgcgcttattaatccagaatttttcttaaagtttatctcatcatttttatcaatttcactattatttgcatcaaggacagctctatttatataactatcttcaatactaattacctttaatgtataagctataaaaaactttgattctacttcttctttactgagattaattgtaaatccagttataactttatctacttgcccactttcatttcttttttcttctactttatatgaaatattattggcaattttttctttactccaaggagtccagctcccattcattggaacttctacaactctaaaatcatgcccatcctctcctgaagtagtcaatctcataccttctggtatattatctgttataacaacattacttattggtgatttatcatcatttattgaaatctgatagtttattacttgaccaacttgagtaatatttgttgctcctgaatgtcctttagtaagaagataattatctcctctatcaaatatacttacagtagcatcatcttcttgtatcttcttaccatcagattcaatcctagctacattcttatatttattaccatgttttgcatttttgtcactgattctagccttatacttaacagtatacgatttatctatatttccaaaattaactgaaatagaatttttactctgttcaatattaaaatcactaacttcttttccatcacttgttactacacttacagaaccatttatcaatgtcaatccttcaggaagctcatcatacaaaataatatcttttaactcttcctgcttttcatttacttgtatactgtaatttatatctttatttttaactggcataaatacagtagttgattttcttccttcaacaagctttttaagtgttcctttagcatctggaacatccgttttatctccaggttttatttctacatctatatctccacttccactttctatttttccagtggtttcaatatgtatttttgcattagtatcttcatcaacctttttaacatatgcttccaaacctattttaccttgcattacactttggccattaggtaattctctaaatgtaagtgtatactctccattactttctgttttatcaaagcattcacttgtataatctaaattaactttattgaatacatctggcaccttaaaagttattgaatctcctgcttgtattccttttgatgttggagtataagttaaattaaatgatatttttttcattgattccgtttctattgtattgttattaatttttacaacaaatccatagtcttcattaagttcttcttctaaaactttcaataaattttcatcttctaatagattatcttcctctggagttttttctgtatttttattgtctagtggtttttcatcttctaaagcttgttctgactttttattatctgttgacttatcttcttctggtatttgctctggctttttattatctattgacttttctccttctggagtttgctctggctttttattatctattggcttttctccttctggagtttgctctggctttttattatctgttgacttatcttcttctgaagtctgttctggttttttattatctgttgaattatcttcctctggggtctgttctggttttttattatctgttgccttatctttctctggagtctgttctggttttttattgtcgctttccttctcctctccagttgatgaattagttgaaccactttgaatctgactattctctcctaattctgaagcataagatacagttggatatattgtagacaccaccatacttaaaatcataattaaactaattaataatgcctttttatttcctttcttcatataaattttccccctctaggttatctatagtttataatcttccattaatatcgtatataaattaatttttactaaaaaattatataaaaaaagctatgaaaataaataaatttatattcatagccggttgcaccactgactcagtatatccataaggtgcccaataatagaatatacttcaacatctctataatatttcataaaaacaattaaaattgctttatttatattaaaaatacaattatatacttctattatattatgcctctatactattgtctatcttttttacattttttaccttttatgagattaattaataattaaataaaatccttatctacaacaattacacaattatattcaggatttatctccttaactaattttgttatatcttcttttaagtcatcctctgacatgtctttggaaaattcggaaggattaactactatatcaaatattaaattcttcttgcttccttttccaactattctaaaatcatgcatagattttacaagactatttttcttaagtatttcttcaagttcttttttggctgacataacttctttatcttcaagacatattgggtccatgtgaattactagatatatatctaatttttcagatatttctctctctgcagtatctataatttcatgtatttccattatatctatgttggatggaatttctgcatgtatagatgcaatacatctaccaactccatagttatgaataattaaatcatgtgtacctattatatatttataagataacaatagctctataatagaatttaccatttcttcatccggtgcttctcctaaaagaggatttatagtatcttttacaagagagaaaccagcataaagtatcactaatgatactacgataccaacatatccatctataggaaaattagtaaatctagctacaataaatgatataactacacaacttgaagtaaatacatctcctaaagcatcaagtgaaactgcttttaaggctgaagaatcaattttatttcccacaaatttattaaaacgactcaaccagattttaatcattatagatacaattaaaagtataagtggtattacttcaaattttacaggaattggatttactatcctttctatagatgactttacaaattgaagtccaaccaacatcaccataaatgctactattaatgctgataaatactctattcttccatgaccaaaaggatgttctttgtcagctggcttacttgctaatttaaaacctatcatagttattgctgaagatgccatatcagaaagattattaaatgcatcagccattatagctatactagatgtgaacattcctatgaatacctttatcacaaataaaagtaaattggacaatatacctactacaccagctacataaccatacttatttctaacatctgtattttgaacgttttcgctatctctgataaatgttttgactaggattttggaaaacatgaaacttacctccctgccctttattttattaacaaattttataatctatatctttatttatgataacataatttatatataaaattcttaaaaatcactctacttcagtaaaatattattctatatatctatttagatacaaattttatatttcgtaaagtttttatggcttagtgtctgtttaatagattctatataagtttttacaaagattatttattatgataatatcatttttcccaagtattacttagaatatgatttttttgttttgtctttacatattttaaatttatactatatttatgtttttataaccttatgatacactataactataagattttaaacggaaaggaatgaaataaatcatgttttttatcagtgatatttacacaaaatcacctattaaatttgatactccattgcaaaaagaggtatacaaaatattacaaaagttagatattgactttgaacgtgttgacacagatgaagcaattacaatggaagattgtgttcagattaataaaaaattaaatatgaaaatggtaatataaaacaacattaaacaaacaaaaaccgcaaagttacaatatatagtactttgcggtttcataagaattaatttttactattagagttcatacttctactatttttcattgttctaagtattagctttacaaattcatttgacaataatatagtggatgcaaatagtattatttttatccacatatcaaagtccaaagaaacagaattaaagaaactctggaacacttgtgtaaatattatttgaattatccctgtaactactattatttgcaatgccagtttatttttaaagaaatttggtattgtactatttaaaccaaattctctacaatttaatgcattaaaaagggcactgaacgcaaataaagaaaatataacagtaccttgttcttctgatgtagctcccaatatattaaaagctgattgagtaaatacaattgtaattataagaatagcatttataataatatttacaaacatagacctagctattattccagaatgtctatttattggttttcttttcaatacataatctctaacaggttctaatcctaatgctagggctggaggaccatccattattatatttacccataataattgtattgtagtaaatggcatatccttaccagtaagttgagatattatagcaattataaatgctactatatttacagtaagctgaaactgtataaatctttgaaagttctcatatatacctcttccccattttattccctctactatagtactaaagctatcatcagtcaatattatatctgctgcatttttagatacttctgttcctgaaatacccattgcaattccaacatctgcttgactaagagctggggcatcatttataccatcacctgttacagctacaacttcgccacttttttgaagcgctgaaactattctcatttttgtatctggtttacttcttgcaacaatagatattcctttaatttcttctctcagttctttatctgtcaatacatctatatatgttgcttcaactgcctttttcccatcatttaataatcctaattcatttccaatagccgttgctgtatttatattatctcctgtaagcatttttacatctactcctgcattaaatgctttatcaatggaatctttgaccccttctctcaatgggtccactattcctacaaatccactaaaaactaaattatcttccttcatataacttcttgaatttcctattaaattcaattcaccttctgaagtcattgcaacttctgttttagaattactcatttttttataagcaaatcctaatgttctcatagatttaatttgtaacttcttaatctcatctaaaatacttttttctacttttggagttattggaacaatattttttccttgttgtacataagaacatttttttaataatacttctggagcaccttttgaaagtaatatatctgaatcctcttgacgaattaatgttgacatcttcttttcttctgaactaaatggtatttgtgatatcaaatacgtttgttttctcatttcattatagttcttatcattatgatataaaagtaatgcacactctgttgcacttcctatatatttaaatgaattatcttctttttctatatctgcagttgaatttactatacagttttgttcaaaatagctgttactttgatactctcctccacttatatatttaccatcaacatatgctacctctaccatcattttgttttgtgttaaagtccctgttttgtcggaacatattacagaaacagaacctatagtttcacaggcttctttctttgttactaatgcatttatctttgccatcttttgcattgttatagctaaggtaatatttatcatagttggcaaaccttctggaacagttgcaactattaatgcaatacaaaccatatatgcatttttagcaggttctaatgattgtaagaaagataatatactgcttgtatctaaaattaacataccttttctctgcatctgtataatcataaacatacacaataaagtagctattacgcctgatattcctgctattttagcacccaacttccctaatttaatttgaagtggagtttgctggtcttcatttgataaattctgtgctatcttacccatctctgtcttatcaccagtatgagtgacaaccattatgcccctaccatatgctacaagagtccctccaaataccatattgacttgctttgcaggtattgcatcctgttcgattatttctgttttagaataaactacttccatatctaatacagcatcagcattcttagctacatcatcagattctcctgttagcatatcttctctaagtttcaaatttatagactgtataagtcttccatctgctggtatcatatctccagtttctatatatacaatatctcctggtactaaatcattttttgatattttaattatctttccatttctaagtacttttacttctatattttctgttaattttgacagggcctgagctgcttttttagattttccttcagttattatgcctatagaaattccaataaaaatagcccctaaaatacctaatgcatcatgtaattctcccacaaaagaacttattactgctgctcctatgagaattaatatcataggttctgtcaaactttctcccaactcgtcccaaaatgttctaccttcttttatagtaaattcatttaatccatatctaagcttcctttcttctacttcattatcatcaagtccaatttctggatttgtttttaagtattttaatacttctttggtaggtttattataatacctcataactttatcccccttgttaattatctataaggaattatatgcttatgatagcttgtatattacttttcaaaaaaaataaggtgttgattaatcaacaccttatagtggttatatattattaaattttatgttacaggctttataaattgtgagctatacaaatcaaaatatttaatcttcaaaatacccttctggatataatgggaacttagatataagttcttgtgcctctgctttacattcatctaatacttctttattatcaatattttctgctaccttattcattattcctgctatctgtataacttctttttctttcagacctctttgagatattgatgtaagacctatacgaacaccactagttacaaatggtgattgtgggtcgtcaggtataacatttttattaactgttattcctacatattcaagagctttttcaaattgttttcctgtaagattcttacttcttaagtcaaccattactatatgattatcagtacctccacttacaatactaaaaccatgtgaaatcagttcagaagctagagtctgagcatttactacaacttgctccattatctttttaaatttatctgtacttaaatataatagtgaaaaggcttttgctgcaactgtattaagatgtatagaccctaatgttcctggaaaaacacctttatcgagtttctttgcatgttctgctttacaaagtacaataccacttcttggtccacagaaagtctttgtcgtagatgaagaaacaaaatctgcataaggtacaggactaggtattactttcgctgcgactaatcctgcaacatgtgccatatctaccataaagtaagctcctacttcttttgcaacctttgatattctttcataatctattaatcttggatatgaacttgcccctgcaattataagttttggtctacattcttttgcctttgcttcaagagcatcataatctatacgtccagtatttgggtctaccccataaaattcatatttataaatgtcatgtaaaaaattaactgcgctaccatgtgtcaagtgtccaccttggtcaagacgcatacttaaaacagtgtcatttggttttaatattgatgaatatacacaatagttagctgtagaacctgaatacggttgtacgtttacatgttctgctccaaatacttcttttgcacgttttattgctagggtttcaagtttatctgcttcttcagaacctgcttgaaaacgagcccctggatagccttcttctgttttatttgtaaatacacatccacttaattcaagtacttctgttggtgctgtactttcagaagctatcatctcaatattgtgttcttgtctaaccaactcatcagctacaatcttgtataactctgggtctgaaatttttgttgtttttaacataataatcctcctcttaattaaagaatatattttattagtttaatcttcattgataaatttattataatggtctataaaacgtaagatattcctccaccaggtcctaatggtatgccaatacccatgaatagtaacaatattattatttctattaatgtaaataccactgagtatggaatcatattcgatatgacagtacctatacctatatctttatcatatcttctggcaaaggccaatataactggaaaatacggaaaaagtggacttattggatttgttgaagcatctccaatacgataagctatttgagttaatgctggattaaagtctagtagcataaacatgggaacaaatataggtgctaaaatcgcccattttgcagaagcacttcctacaaataaattgataaatccagatagcaatataaatcctattatcaatccatagctaggtatccccgactctgctagtaattttgctcctgttattgataaaattgttcctaagttactaagattaaataaattaataaactgggatgctataaatgctaggactatatatccacccatatcactcatactactacccatcatagatactaaatctttgtcactttttatcttcttacttacttttccatacactaatcctggagttaaaaatataatagtgattataggaactatacctttcattaaaggtgcattactagatagtatagaaccagtctctggatctttcataaatgcattgtcacctatacataaggcaactatcactactactacaactaacaatgataataaagcgtattttatacccttattttcaagttcactcaattcctgtatatccttatcatttgttgaatcattatattttgtaaaacgaggagctataaatttttcagttacaaatgctcctgcaaaagttaaaactatcgctgatataaaagcaaaataaagattcattgctggattgccttggtaagatgggtccatcatttgagctgctggtattgtaaatccagctaacaatacatctgtagtactaagcataacatttgctgcaaatccccctgcaacacctgcaaaagctgcaaacatacctacaagaggatgtcttccaattcctaaaaacacaagtgctgcaagtggtggtaatattataaatcctacatctgctgctgtatgtgataacatacctgcaaatacgattgctacagttacaagtttttgtggaactttacttataccctttttcattaacacttccataaatccagatttctcagcaacacctgctccaagcattgtaaccagtactaatcctaaaggagcaaatgactggaagtttgtaactatgctacctaaatatgattgaatctgctctttctctagtagatttactacctttacaacttcttttgtagaaggatgtatttcttctactcctaaattagatataactgctgacaatattacaacaattatacatagtaataaaaatatggttactgggtctggaagtttatttcctgctctctctacaacatttagtgccctcatcaataatccactatctttgtttttttcctgtgaattaattttcctcaaactaataccccctcataaactttatctccagaatgctctatcttaaattttattttttaatttatccatataatttataacagactgacatagtacatttgtacctaccaatatagaatttttatcagctttaaatttaggattatgccactgatatatacaatcttgttctttattgcctacccctaaccagtaaaaaaatcctggggccttttccataaatatagaaaaatcttctcctcctgtagaaggtattggatcaactatagcatcttctgaatacaaatcacacacagacttacaagctattgtgtacatctctttactatttataacagctggtaaatcaaataaataatctagctttgcagttgcttgatatccacgagctatctcacaaactatattttctaaattttctgatattttctttcgtacttcattactaaagcttctacatgtacctgtcatatctaccttttctgaaattacattatttgcagtccctccatttatagtacctattgatataacagctgattctaatggacttatgtttctgcttactatggtttgaatacccattataattgcacttgatgctactatagggtctattgttctgtttggtatacctccgtgacctccaaatccatttacttctatcttaatagtgtctactgctgccattaacccacctaacttaacacctatttttccacaaggtatatctggatgattatgaagtccaaatatagcatcaacttttggattttccattactcctcgttccactagcatcttcgcacctttattgacttcttcggctggttgaaatataaactttacatttccatgaagactatctctaatatgagacaatacatatgcacatcctacaaggcaagatgtgtgtatatcatgcccacatgcatgcattataccatcatatctggatttatactcaatatcaacctcttcatatattggcaatgcatcaatatctcctctcagtgctactgtgggaccatcatacttcccttttaataatccaacaactcctgtttccattcctaaatctaatatttctatgtctaaacttactaataaatcttttatagcttttgtagtcctaaattctttaaaacttaattcggggtgcatatgaatatctgtaaaaaaatctaaaatatcttctttatacttttctgagattaaaataagttcatgcatactaacacctctccaaaattttatttttttattttttataatttaactacaaattatataagttaataatctttataaagatattttttataaatttaattttagtttatatttatattttactatattattttaattaaatatattatcatgttttgcaatttatttaactattttgactttttaaattcggattatataaaaaatttctttaaataaaaactattaataggtgactctattcctgactttgtgttgatttttttctacatgtaattgctttatacaccatacagactaaaattaaaagccccatataacctgtatatggatataaaatgtttactaatttaccaaacggtaaaaaaccacctatacaagccaaaatagctattactgttgttaccaatttaaatttaggatgttcatcttcaacaattctattggttacagaccataaaagtggaacagctgttgtatagatacctaatattaatgcaactgaaaaacatacacctacaataggagatatattatctgctaaataaagtgatggtatttctttcatatacaaatttcctatatctgaaatcatagccaaatacataactataccagcagtcataaacactattccacctaataaacctccccaaaaagcatcctttttactttcaatagaagctcccattcctgttaaaaaaacaatcattacaataatatttaatgtattatatattacaccagaaacgattggactttctgatgcttttgtaacttcaatatttttcatagcttctccaaccatagataaaccatcaaaatgcttaaacaagcttattaatccaacagcaattgtaaatactgctatcactggtccaatacgtccaagtatgcttactaatttttctaaacccatagacactgtaattaaagtagcaacagccatcaatactcttcctaagtaaggatttataccatagtattcagttaaagttgagcctgcacctgaaatcattactataagaatcccaaataaaaatattggactaaaccattcgtaaaattttcctaaaatcttcccacaataaaaagtgtaaattcttgttggttctttaagttttaattctctacctctagttataacttcagcaccaagaaatgaaaacaataccattgatattaatgctccaattaaacccatatacccttgtgaggcaaaaaattgtagaatttcttgaccagtagcaaacccagaaccaattgctgttgctagataagcgcctgcaatacagataatatttttcatattcactttgtctgacatattaaattacctccattataaagttaccttcctttaagaaatataaactctcagtgaattaaatgaaaattctgtctttttgaaacagtatttaattcactttttttattttgtatatctttttctttttatttatatatatttttttatataaataggtacagcttttataaggtttaatattattaaatatgtttaaagcgctttaatttttatcataattaaagtatacttattcagacacactcaaacaattatctatattgactttttatttatcaatttcaatttttagtgttcagtttataaacttttggagtcattcctttttctatcttaaagtttttataaaagttatttaggctattatatccaactatttctgcaatctcatttatactttttgtagtattttcaagtaattcaatagatttttctattcttatatgatttagatatgatataaaagttgtatttaaattacttttaaaaatcctagatatattagatggattggttaaaaataatctagcacaatcatttaactttaagtcattgctatagtttagatttatatattccagtatctcatttaataaatcattattggtatattgatatccaataattttttctacagacttagtaaattctttcatatccaatggtttaaggagtatatcttttacatttaatctcaaagctttttgagcatattcaaaatagttaaatgcagttattactacaaagtttatttttttagataaatgagatgttttttctattacttctaacccattgtatattggcatttgaatatctataaaaactatgtctggctctaaaccaatgattttatctactgcttcatcaccagatgttgctttaccaacaatttttattggcatatctttcatttctataaaatgtgttattatttttagaacagcttcttcatcatctattattagtgctcttctcatgagaatacctcccttttagcttaataatataaaaaagtaagatatataaaacaacataaaaacatctaatatatttcttaacatttataaaacttattaatttttcacaagttctatacatactccttataattttcaataggaattttaatcattatgtaagttccttcattatcactcgactttatatccatatcaaaattatttccataagcagatgtgaattttgtatatattaaagacaaaccatgaccattattactacgaatacctgcctttattttgtctatattatttccatctaagatagttccattattatgaatctctataatagcatactgagaatctaatcttgcaattatttcaattcgcttttctgtgtcaatatctctaaatccatgtgtaaatgcattctctacgataggttgaataaagttaaaaggcacagaaaggttatataacttctctggaataagatattttactttaagtgcatctccataacgtaatttctgtaaattcaaataatttttaatgtataatatttcagattctaattctacaaatcttaaatcagacctcattgtatatctaaacattcttgataaatctattattgcactatacaaatcataactaccatcatctagtgctatgcttgccattgaatttaatgtattaaataaaaagtgatgatttattcttaaattagtaaccatatcttgagctacttttaaattcatttcaagttgctctccataatgatatgttcttgctatagtcttctctttttcttgtaaatcctttcttatatcattaaaagagcaaaaatttattatatttttagatatttgtttcaagaggcgttttatacttctagcagctccctctggaatatcatataaattattatgctctgtatctaaatttaaatcagataatagtacataccctcctcttataacacctatgctattgcttttgtacagtattggtatattatatatagttatcccatattcacatacaaattgattgctacttttttgattcatacaatcacaattttgaggaaatttcataggattacatttttcaaaacaaaaaagtggaaaataagggttttttaaaactatattccatgaatcatcatatataattaatggaattttaaacgggtctataaattgaccacgaattgattctactgctgcatacaaatttaatgtactttcactataatttatcaaggtcttctttaaataattattaggattaatatctataacttcactctctcctacatcatctacattatttgaaacaataagttcttttatttctctatcgcctgtatttatagtttcatgtgtgctaccagattctatataaaaaatcataccttgataaaatggcttccaaactccatttataatatacaaaccctctccctctaaaatatatatcatctgctcttgaccataatgaacatgattaaaatgtttcttaccaggcatagttactgcaatgtatatattcatagcttgttttggattattttcatcataagtatgtttccattcaatatatccccactcagtattttgaattttcataaaagattcctttcctgtaaattatttatgttcatattgtgaaaaattagtaaaaaaaatgtgtacatactctttcatatgatagcttactatatcaatattcattagtttgtacacatttttatattaattatttttttttattacttctattattattgtatcacttttatattaactatttttttattacttctatattattgtatcacttttatattaactattttttattacttctatattattgtatcacttttatattaactatttttttattacttctatattattgtatcacttttatattaattattttttattacttctatattattgtattgcttaaaaatacataatttaactcttatttaataacagaaactcccatatatggtcttaaaacttcaggaacaaccacagaaccatcttcttgttgataattttctaatatagctgcaacacttcttccaatagctaacccagagccatttaatgtgtgtacatattcagctttagaatctttatctcttttaaatcttattcctgctcttctagcttggaaatcttcgcagtttgaacaagatgaaatctcaacatacctattgtaacttggcatccaaacttctacatcatatttaaaagaagccgtaaatcctaaatcacctgtacatatctttactactctataaggcagattcaataattgtagcatagtttccgcattgttagtaagcttttctaactcattgtaagattcttctggtgcaactattttaaccatttctactttgttaaactgatgctgtcttactaaacctcttgtatctcttccagcagaaccagcttctgacctaaaacatggagtataagctgtataatttattggtaattgttcaaatttaagtatttcattagcatgtatattagttaaaggaacttctgatgttggaatcataaaatagtccagaccttctattttaaacatatcttcttcaaacttaggtaactgtcctgtacctaaaaaactatttctatttgccataaatggtggaatgacttctgtatatccatttacttttgtattcgtgtctaagtaaaaatttaataatgctctctctaatctagcacccaatcctttgtaaagagtgaatcttgaaccagttattttactcgctgtttcaaaatcaagtatacctaattctgttccaatttcccaatgagccttagattcaaaatcaaaggtagtagtctttccccaagttcttacctcaacattatcttcatcagtttcaccttgtggtacttctggatgtggtacatttggtattctcattaataggtattccatcttatcttctacttctttaagattttggtctattaccttaattttatcagataactcttttagtttaatcttttcattttctacatctttaccttcttttataagatttggtatatttttagatgctgtatttaatttatgtttcataacttcaacttcttgaagaatctttcttctttcatcatctaacttaactacttcatcaaggttaaagtctttttcgccccttctttccattgctttttttatacaatctaaattttctcttattctttttatatcaagcattttttcctcctcagtacctaagattggatttatctcttaatctcaaataacttagataatatactttatgcttgaggttaagaaacctttttctttatccgaacctgttatttttattttatttatattttactcacttttttgtccattgtcaaattatatttaattaaataaatgaaatttaattttaggagaatattgctagatttaacttcattataattatatctattttgctaatcaattatctattttgactttttctttatcaatcttgtatagttattaacttttatataaatttttttatattataacatagtcctatatatctattatttggatagaattattttttaaattagaattattttaatgaatgcttcaagtaataggtatgaaattgaatcttttagaactgcttataaaaaatactcaaagaaaaatagtaattttctcagattcacaatatattttatatgaaatgttataaggtaatctatttaataaatttaaatttgctattatagatttagttccaaagtcttactgcaaagtaatatacatagttttttaataaactaataagtgcaattaataactacttaattgtttaatatagtacatagataactttaataaatcgacagttatttaaaaaggtagaatcaataaaattatacttataaatcttcaatacaataattaaaatttaataaaaaatataattgttgatttaactgtaatcttatttaattctacctaacttattatataaaactattttttatagattataaaatatctaactttcatctacttcaaagaatacaatacttctccttctcttatagtctgcaatactttaatatcttttattttcatagggtcgattgtaagtgggttttcatctaatattatcaaattagctaatttaccttctttaattgaaccttttttatcttcttcaaaatattgatatgctgcatttatagtaacaccctttaaagcatctaatgggcttatcttttcattctctcctatttgtatacctttttttgtaattctatttacagcacaccatactgtttccagcatattaggtgctattactggtgtatcctgatgaagagtgtaaattaatcccttttctatagttgttttaagtgggctaatcttaaacgctctatcttctccaaggtttttgatatgaatatcaccccaataatatgtgtgagctacaaagtatgaaggtatcatatttattactttcatatcatcaatctggtctgctcttactgtttgagcatgtatcataactggtcttatattattttcactactttgctcttttaagtttaaaactttctcaaacgcatctatcaactggtctgctgctgcatctccattacaatgagttaagagttgcatcttttcttttagtgaaatatctataaacttttctacttcttcatctttgtatataggatatccacaataaccatcatctgaattttcatatggtctactcaaccatgctgtcttaccttgtggagaaccatctaagaaaatcttataacctcctactttaaatctatttatatatttttttataaactccctattattatctaatacagacttactttttttcaaatttacatatcctacaacatccatttttaatttattttgatttgccattgcttttaaaatgttaaattgattttcttccattaaaccttcttgagctgttgtaataccatagcttagatatatgttctgtgctttttcaattgaattaaaaatctcatttgatgatggttgttttattttagatgctacattaaaaaatgcattttcttctaaatatccatttggttcttcactgccttctactctacctatatgtccaccttctgggtcacgtgtttcattggtaacaccaagctgttttaaccccaatgtatttgcagctcccatatgaccagaagcatgtgaaattagtattggattttctgaagatgcactatcgagtacactcttatctggatgcttattttcttctaaaaaattattatcatatgaaaatccaattatccagtctcctttttttatattattcgactctttgaaatcctgtattttttttactatgtctttaaaactggttgcatcttctaaaggaactagctttagagtagtagcaaaagctatcaagtgactatgtgaatctataaaagatggcatcaatgtcttaccttgtaaatctataatttctgtatctttatttttcaaagcaaatacttcttcttttgttcctatcttttttattattttatcttttataagaatagcatctccacatattgaatcttccattgtgatgatatttccattgtaataaattttttctttcataaaattctccttacgttgtctactttaataaatttttttcattattttctgcttaattatattatcttctttataaactttttctttagagtttaatcatataaaagttttatttttaattattgtttgccaagaagtaaatactattcattgtaaataagacaaattaataggctttatactaattgaaaaaatattataagttgttaaatttaaatatctaaactcaattatatctgtacaattgtaattttttaaatcatgatgtattattttaaatatacagttacattattattcacaatataagtatcttagttctcaaataacatctcatgtaatctattcaatgcaaaaaatttaaatattttttaggaggttttttatgagcaaggaaaataaaaatgtaagaattgctgttgtccaggcgtcaccagtcataatggatttagaaaaaactgttgaaaaagcattaggattaattaaagaagctggtagaaaaggggcaaatatcgtagttttccctgaagcattcatacctgcatatccaagaggtctttcatttggatttgttgttggaagtagaacaatggaaggtagagaagattggaaaagatactatgataattctgtaccagttcctagtgctacaacagatttattaggaaaagcagcacaagaagcaggagtatatctatcaatgggtataacagaaagagatggtaatgatataaattgtaccctttattgcacaaacttatttttctctccagaaggtaagctaattggtaaacacagaaaacttaaacctacaggaacagaaagatgtatttggggagaaggagatggaagtactcttacagtagttgatactccatatggaaaaatgggttcgttgatttgttgggaaaattatatgccattagctagaacagttctttatgctaagggtgtaaaactttacatagcccctactgcagattcaagagaagagtggcaagcaactatgaagcatattgctttagaaggaagatgttttgtaattggatgcaatcaatatgttgaaaaaaatatgtatccaactgaccttaactactataaggagctagatgcagaaccagaaattatgtgtccaggaggaagttgtatagttgacccttttggaaaatatgtagcaggtcctattttcaataaagaagaaatgctaatagctgatttagacctagaaaaaatagtacttagtagactagattttgattcagaaggtcactattcaagaccagatgtatttgaattaattgttcatgaataatctttttacacaaacatctacataaatttttttacataaaaaaatgagatactcataagtaaatttcaagtatctcatttttgcttaaaacctataatcctaattataaatttattcgcctatattttttctaaatcaactactgttcttccaacatgttttcctgtcattatcgaatctatactatcatttaactcttccaatgatactacatttaccatatcatctaaatcatctaatttccattcatttgataataaatcccatatttttaatcttaagttcattgggcaatccacagaatctataccatataaagtaattccctttaagataaatggatatactgaacttgtaaaatcaactcctcctgcattaccacaagttgttactgctccacaataattagttgtctttattgctgttgctagagtatttcctcctactgtatctattactccagcccatcttggtctaagcagaggtcttcctgagttatcatccacttctgacctatgtataacatctttaacacctaagtttagtaatacttctttttgttcttctaattttcctgttgaaactacaactgaataacctaatttaatcaatattttagttgcaattacagcaactcctccagtaccaccagtgactaatacatctcccatattcttgtctacagaatctataaatttatacacagataaagctgctgtaaaccctgctgtaccataatccattgcttcttttagtgaaagatttttaggaagtttaactacccaactagaaggaactcttatgtattctgaaaaaccaccagaagtattcattcccaagtcataacctgttactaaaacttcttctccaattttaaaatcatcacaactactagattctactataccagatgcatcaattcctggtgtatgaggatactttctcgtaacacccttattaccatttgcagaaagtgcatccttgtaatttagagaagaatattttacttttattagaacttcgccttctggcaatgtatctacttctctttcaactatatttcttctaaaatttccttcttcttctgtaatatatagtgatttaaattttttattcataaatttcctcccaatacatttagttttatgttaaactaattatagtttataaatagttttatgtcaaactaatttaaatagattaaagattggagaataatttatggaagataaatatattgtacatttcataagtaaaacaaaggctagtatgattaaattcattgaaaataaactcagtaaaaatggtttaggtgagttaatacctactcatggaaatattttaactgcactttatgaaaataatggaatacttacaatgaaagaaattgcagctaaaataggaaaagataaatccactgttacagtgttggttaataaacttataaacctaggatatttagaaagacaaaaatgtacaaatgacaaacgtatcacgtatataaagcttacaaaaaaggcactgcttatagaagatacttttaatagcatctcaacacaagttaaagagacagcataccataatattacagaaaatgaaaaacaagaatttcttagaattttaaaaaaaattaatgataattttaaaaatgctgactaaattgagcataattatatctcctattggaataataaataaaaagaatcaaatattgtaaaaatttattatgatagagaggtagaatatgaatttaaaagatagtaaaactaaagaaaatttattaagagcttttgcaggtgagagtcaagctagaaatagatacaatatttctgcatctgtagcaaaaaaagaaggattatatataatagagtctttatttaattacactgctgaccaagaaaaatcacatgcaaaacaattcttttctaaattaaaagaatttgctggtgaaaatataagtatatcaggagcataccctgtagatttatatgacaagacagcacaacaccttaaagctgcacaacataatgagcttcaagagtgggatgatgtatataaaaactttggaaaaacagcacgtgaagaaggatttgaatctatagctaagttatttgaaaatatagctgaaatagaaaaagttcatggtgatagatttggtagatatgctactgatttagaagaaggtactttattcagaagaaatgaagatatacaatggatatgtacacattgtggccatatacatataggtaaagaagctccaaaagcttgtcctgtatgtcttcatccacaaggatatttcttagattttaaaaactcattatttgaataaactaaggcaataattctatttaaacaatttactatatttatatcaagtatttttataaatactgtattatcttaataacaataaaatgaaccattgatattactataagtagaaaatgtagtttaaatacaatttatagtaattcatcatggttcattttattatttactaatccctataacctacttaaatctatctttaacttttacatactcacataaaatcttatctttaaactaaatatttaaataaagtgtattttaagtagattattataatacattatataagataatacactatgataactttatacttatatcatttatttcttttgtcaagtcaatctcaataatcttaactacatctttttcaaactttacttttttataatccagacatcctactacgaatggaactccaaactttctaaacaaataaatctttccactttcattgtatattgatgtaaaattttcttctattatattcactatcaattttaactcttcaaaagttattatagatttaactaaaaacttctctattatgctcaatataagcagttcttttttacctatgctttgctcttttttatataaattttgaaatatttctttggtataattacatataacttctttactgagaataaaatcaatgtcaaattccttattaatatcctttttcataaacatatttgcaatatcatcaagagaagtctcttctttcatagacaatattaactctattctttctagtattttatctcttggaaagaaagtctcttgacctgtaaaagctgatttttttataaaccattcctctggtattatgttttttcttttccatctatataattgaccataagatatattagttttgctcaataaatctttcttagatattaattcttccataacttttctagcccacctttatactgttttttacagtagaattatctgaaactgataaattatcactgtattcaatatttccaacgtcacaattatctactagagatatgcttttgcctcgtatatcttttattgatgcatcttctaattcaatagtatctccctctatcaaattacatttaaactttcctgaaaaaatattaatgattttaattaatgaaaaagcatctttgcttcttcctatttttatattagttgcccctatctctttacaataagaacctcctcctgaataaacatatatattttctccatttaaaagaccatcacattttattactccatatacctttatatcttcacattctatatttgatttatttctcatttcgccatagatttttatatcttgtgcatacatattttcatttacacttaattgtcctcttattgtaacattattacatttaagtttgccatccactttctgttgagcagttataactaagtcatctatttctgcatctccctctatattaagttgaccattcactcttacacgctctgctttaagattgcctcttataatagtttttccgttaacaacaaaattttttatattgatgtcaccttcaaattttgcatctccaaggacttttacttcgttacttttaacatttccttttgatttagaacttcccacgatttttatattttcatactcaccactacttataaagccttctccaagtatttttatagaccctttttccatattattacctcattttaaattttatttttaaacctatttattacttatccttctttaattttattttttcacttatattctttatttcaccaactattgaatcttcatcaatctctatactttcactgtactccaaactttctacataacatcccttgcctattttaatattttttcctcttacaactttgacttcactattttctaagcttatttcatctgcttctataatatttgcaaacaatttactttctgtatactttctaattgataatagacctaaacttattaaatttgaagacactttttcaaagttgatatgctttttttctagcatacgaaattttttgcaataatctccatgccccttttttatatttatactacttgctccaacttcattaaaattagaagttccatttaaactaatattaacttcttcacaattcaaaaatccattacactccaagattccacttaaattgatattttcacaatctatattctcatttgcttttaaatatccttctccatgaataatatccgattttatacttccttctacattaataattccactagtatcaatttcaacagaattaatatttcctgtacatctaagaagtcccgatatctcaacttttgatgccagtatgtttccttctactttacttaaaccagatgtaaaaaattcattacattctgttgtcccaaaaacttttgctgaaccagaagaatcaaatttactacattttacacttccttctattttgcctgttcctgatatattaacattatcaaaaattccacctttacattttccaacaccatcaaatcttagtgaacttaattcttcattcataatgatatcctttctttaccgtattttatctttaaacctaatataacaaaacattgttacgttgtcaagtctgataataatacttaataaagcaactatcatttattttctataaataggcataaaaataatagggaaatgctttatttaaactagaaatctaatttcttagattgtggtttaaataaaatatatccctattactcaatctttatatattcattgtataaacttctaaaatataagtctttaaattctactgtcaatactttttatacactgtttgtgctatcatttcacacctaaaggagtaggctctccgcactattctgtaacctaaaagacactatcttcttctatctattgataaatttttctattacatcagctagtctctccatatcagttggataaacttcacctatgctacctattctaaatgtatctatatcagtcaatttacctggatagataacaaatccattatcttttaaataagtataaaattccataaattcaaactttgcatttttaggatataagaaagttgttattacaggtgattgagcattatcattcaccaaagtatcaaatcctaaagattttaatcttgaagctattgtaaactgattttctttatatctagcatatcttttttcaacagaaccttcttcttccaattctaataaagcttgataaaaagctcttacaacatgtgtaggtgaagtaaatctccatttaccattatttttctccatagtctcccattgcgcatacacatcaagagataatgatttagctatacctttacatttagataatttctctttattagctattataaaaccaaatccaggtactccttgtatacatttgttagaactactaactaaaaaatctatattaaaatcttcaacatcaatctcaattcccccaaaactactcatagcatcaactatataaattttgttatattcttttgcaagtttccctacctcttgtataggatttaatctacctgtagtagtttcacagtgaaccattgatatatgtgttatatccttgttttcttttaataaattttctactacatttaaatccactgcttctatatctttaaatgtgcagtcaacaaattctatgttaagataattacatatatctttcattctctttccatatgctccatttgcaattacaagaagtttaccatcttttgaaatagtacttcctattatagcttctactgaaaaagtcccacttccttgcattaatacacttgtgtatttatctgtattttgggttgctagagatactaatcttcttctaacatcttgtactaggttattatattcaacatcccaagtacaccaatcttttaacatagatgctcttactgatttagtagtagatagtggtcctggtgtaagtaatatgtaatcattttctggtacaaaatctgatttaatagtttcattctctatttttattagtatatcttctaactcagccatagtttctattacaaaatgtgcacctgcctctttaaatttctttgaaactatactcatcttagcttttaattcttccttatccatgttctctacttcttcttgtgtaagccctaactcacttgaaccttttattacagcaacactccacattcctgcatttacgccttcttttacatcacttattgtatctcctacttttaccatagaactcataggagacacccctaaagcttcagcatttttatagcacatccaaggatacggtcttccttgagatacttctgatggtgttacaagaaaatcgggtgagtatcctttctttgctgcatttggttcaactatgttcatcatctctcttgtataacccgttgtagaacctatttttaatccattttttctcaacttttcaatagtttcaacaacatgaggaattggagtcgtatactcttctaatgtctcaaataacattggctcaaattcagcataaagttcatttacatcatcttcagttggcactttaccaaacttatctgaccaaagattttttattctatccatttcacacatttctcttatatggtctatttttaattttcccataggttttcttgcttcttccattgttacatctatacctcttcttttaaatatctctataaatacattaagaggtgcaaaacatccataatctactgttgttccagcccaatcgaatactactgcttttattttttctccatatatctttttcatatttatagcctccatagattcattttagaatttttgtgtttttaattgtttttacttttaaagtataactttcatatgttaattatacatcatatttaggttaaatatatattaaatttctgtttttagttgtatttaattgtttttattttatatcatatttccataaaatcctaagttacaatctaaaatttactttctaatcttaatctatgaactgactatattttatgaatttagttgtattaagcatagttgtattatataaaactaagggtttattttgcttctatccatgttatatttatctcatttaacttatccttccattcattcggaggttctacatcacaaataacaaaatctaattcctctaaatctgctatcttatacatactagcaattcctattttagaactatcacataatacaaaactttcctttgaattttttatatattcttttgacaacaatgccttattttggtctatactactaattccaaaactatcaagtataccttcactagatataaaagctttatctacgtataagtttttcatagtgtctattgacattggacatgctgtcctttggtgttttaaatttacttttccaccaataaatataacttctccatcaaacaaaccttgattctcataagaaatcaattttgatagaactggataagagtttgtaataatttttaaattgtttacagatattatataatctacaatctgcaaattggtagtaccttcatctatgataattgactcattgtcatttacaaacttagctgcgtatttagcaatactttgttttttatctaggttagtattgtttctctttatatgttctggttcaatcactccataatttatttttatagcaccaccatataccttttttaatttattttcattttctaattcttccaaatatcttcttattgtttctgatgatacttctaatctttttactaattctttagtatttaccttcccttttgaatctaataatttaagtatttctttttttctatctatcgaatttaaagacattcattttcctcctaaatataatatatttttctcctataatattacaatgatacctaagatttatgaaatcatatttatgtattaaattttttacttaattaaagttattttcaaaagactttgtattatcattaaaaaagtccatcaaatattagtatcagatggactttgtaaaattttattttataaattaatatttaaagtctaactactaatttattttcttgtctccaagaattttactaaattatttacagtagacatatcttttctctctaaatcagttggttgaagctctatccctaatctattttcaatttcaagtaaaacttcaattatagctaatgagtctaaaagttccgtctcaaataaattaaggtctaaatcttctcttatctcatcagtccctaatacatcttcaaatatttctataactgtttcttgcataaattttcctccttaaaattaagctaaataacctgagaatatcagcaatccaaaacacacaatatggaatgtaatgaaaatctgcactctctcgaaccatttatcttttttatgttttttataaaatttagattttcgctgatatatatcagttaacacaagtgccaatccttggtatacaccataagcaacataataccaagttagaccatgccaaaatcccattgttatcatggttatcatctgagccacatgagcagcagtagtccttttcttaaatcttttctttctcattgatgacataacaaatctagaaaaaatataatctccaaaccatcttgaaagacttatatgccatcttgtccagaactctttcatatctttactgataaatggcttgtcaaagtttataggtacttgtattccaaatatgtaccctgtacctatagcaaataaactatatcctgcaaaatcaaagaacaggtataaactatatgcgtacatataacttaaaatatttataaaactcatatctttaggtattcttgatacccaatatgtatttatcaaaaatgctataacaaacttataacctactcccatgacaatattttttattcctggcagtaagtattcttctatatactcttttctagagatgtgtttttccaagtcctgttcaaatcttcttgacctatcaataggtccagaacttaaagttggaaaaaataacataaaataaagcatctttgaaattttaacttcttttatagctccatcataaatttcaataaccatttgtatagttctgaaatttaagtatgatattccaataaatccaattattccaaaagaagtaactggagatattttatttattattattgggagcattgatgcaaacaagaatccccaatatatgtatttatttttagtttttcttcttacatattcatatcctttaactattattacttcaagaataataaatattaccaaatactttagctggacatcaattcctactattaagaatatcataaacaaacttgccaacataccataatactttatattcttgcccattagacctaaaattactgctggtattgatgttaataataatatataaagataaaaataatctccatactgtgaaaaaatcattaaatttcctccataagtttctttctgtctattttaccattgatatttgttggaaactcagagattattgaaatatttcttggaatcatatatgaaggtatatactttccaagttccttttttattatcatcccatttttaatattacttaaatcattcttttcatttaactcaacaataccttttaagtaagcaattttttcgtccttatatactggtaaaactactgcattttttacattatgtacttttctcaaattattttctatatcttctatttcaattctaaatccatttaatttaatctgaaaatcttttcttccacaataatatatatttccatctaaaagatatcccatatctccagttttataagctctccactttacaccatctatttcatcatagaaaaatacttcatcagtcttttctttattattgaagtaacctttagaaactgatggtccaattattataatttcacccttttcattttctttaagttcatttccatcttcatcaagtatttttattttacaatttgacatagggtatccaactggaagacttttttcatcatctatagctttttgagtcatatcatttacacttacaccaacagtagcctcggttggtccatatccattgataattcttgtgtttggaaatctactcataagttctttagtaagattttttgaaagtgcttctcctatgaatatcattgactcaaggttaggaagcattttactattaaactctttttcagttatacatactcctgcaaaagaaggagttgacacccatacagctatatctgagatactaaattgtctaaatagttctttatagtctgctaatacatcttttgatattgaaaataatgtagctccatggataagaccagggtatattgttgtaactgaaaggtcaaaagaatatgctggttggttcattattactttttcacttccatctatgtttagatatgggcttatccaatctgaaaagctatctaaattgtttgaacttatttgaaccccttttggctttcctgtacttcctgaagtaaatagtatatatgcattttcatcatcttttacccagttttctttatctaatgattttccctgatattcatttattatatcatttaatttatccatatcaattacattgatatctccaaaatttctttcatcactaaaattaaatattacttttggttttatctctttagtgacttcaaaaactctatcaattggaaaactaatatcaagaggcacatacgctctacctgattttaaagctcctatcatacatgccattatcatgttttctttatttccataaattactataggagtatcctcttctttgtatacatcctttagaaatactgatatagcatctgaatattcatttaaatctttataagaaagtttatctccattacacattagtgctgttctatctgtatttgaatatttttttattccttcaataattttcatataagaatgctcctttaaaatccgttataaataaatggcaattctttaaatggagtaaatgttagaactcctatcgccaatattataaccatagttaaacaaatactagttaacaaatctttattgttctttaaatattttaaataatctctcacagacatctacccatcctttcgtaccaagatgcattacatcccttaaataatacttatctgaccctttatctttaaggtttagaacttcaaagcctttgctttctgctattttttgtgctttatcgtagtactgatttctttctttttcagaaataccagtcaaattatagaatttatccatacttgggattaatacaacaactggattaatacctaagtcagtacatacatttagcatcagtttataattttcaaactccttagatgttaataaatttacatctttgtctcttcctttgtattgctctataccatctttaaaatgctctttataatagtacttatcaatatttagtggatttttaccaactctttttttagcatcttcaatggctttctttctctcatatgaccaatttattggtctttttctttttgttgctctctttttatctagcttaattaatcgtttataaagaatacccttttctttaagagctatacagtactttcttccttgaaaataaggctctaaaagcaccttttcagctttttcaggaaatgtcttaggttcatatagcttagcatataatgcttctgctttatactcatcacttccccataatagcttacttgatttttttgcatattcaatcttattttgtttagatatttttggattatctaaaaatcgataaaattgtattggtgaaaatctagactgataatggtgacttgtgactccgtctttttccataaaccattgcatagaaattaacaagacaactttcttattatcaatattaggattcatacttcctaatattgcagcatcttgtaatgtctgagtataggctctcccaattgcaaacaccttatttttactcctatttgtattaaaatagtactttggatgttgttttgttgaattactaagttctgatgaccccaaaatcataatatccttttctcttaaaaaatgattatttgctgtaacccctttatcttttatatcacttaaagtatcatccataattggaagtagatttttctccctcaaaagttcatcagttttagaatcaagaaatttgtctaacccaaataaaaatactacgcctattataaaaggtgtaataaagtatatcaattttctcatattttctctcctctaaaaatattcaaatttatgttattattaatcatattagttttgatatgtatattcaactacaaaattgtaataaaatcgtcaaaactttttttgatactgttacaaaattgtaaaaaaaaaagaaaaaaacaccaaaaataaatttctttttagcactttttcatacttataatttgacattttaacacttggctaagtatacaccttaccttaacttaaaattaaatttatttaagaatatatattataaattcttatattttctaatataagctatatactatcagctggataaacaatactactttgtcttcttatctcatccataatttccattactattattgaattttcatgagaatttatatttgattctattttattgttatttataagacttataaactctacaagttcataatacattccttctatttctctaggcttttcctctgctttttcttttggaatagatatatcttcttctcttccatctctgtatttaataatagctttttcaaatagattaagcttttcaattattatacttccctcttctccttgtatttcagatggtatataagaatcagctactttagaatactgaattattgcatccatatcatcatattgaaatacagctgaaccttctccatccactccagtttgaagtatatgagaaactgcctttacagtttttggagcaccaaataaattcaccataggatgtatacaatacactcctatatccattaaagctccatttgacaactcttttttaaaggcattttctataattccatttttatatttatcatatcttgaagaatactgacaatagcttccaaaaaatcttcttattttccctattttatacaagttttctttaactgctttaaagtttggaacacatgtaattctcatagcttccataagcaatacattattatctttggctgtttttatcattgatttgacttcttttaaattagatgctaacgacttttcacaaagcacatgttttttgtgttttaaacaagtaatggcttgctttgaatgtaatgcatttggagaagctatatatacagcatctatatccttcgatttagccatttgttctaaatcatcaaaaaaaatacttgctccatgtagagttccaaattctctagctttttctaaatttctagaatatacagcaaccaattcaaaatctttaaccctagatgcagctcttagaaatatatttgctatattgcttgtcccaacaataccaaatcttattttacccatcataaatcactccccattttctacactttattttaattttaataaaaaactttacaacttatagatatattataaaataattttatcaaataaaaaagaaagctaattttaaatgatttcaccattttaacatagctttcttttaactacaatctaaattcaacttatatttttaaagttatctttctactatatctttatttcccctcaaaaattttatagtaagaatttcatccacaaacaatgttactaaaagtatagttacaagaattggccaataaggtattataagactatataaactatcaactatatacacttgaaaatatctaactccaataaatgtcaatatagtccaatatacagaaaactttagacatactattcctctactattgtacttataatctgaataatcccaatagaccttattaaaatatactttcataagtattcctgtaatatattctactactgtcggcactactagacataataaaagcaatgcaaatatattattggggtcaataaatcttgagacctctattataatcgacattgcaattgcatacattggtttaaatggaccatttaaaaatccatcttcttgaaaatgcccttgtttataataactatataagttttcaattatccaacctataaaaccatacaagaaaaaattaaataaaaaatataatagagaacctacattatccatgaatattcctcctagctgtttatacttattttttctcatattcatggatttattctaaatcaaagaaattatatttaatttatttaattaatactttatattatagattgtgacattctttagagttcaaactttttaggtattctctaacttccagtaaattttcaagtatcttatgtgattgtgatttaatttgctcatctggctcttttaaatctggtacatttatacatcttatcccaccattgtatgcagcttcaactcccataggcgaatcctctatgacaatacaattttggggattaacatttatctttttagctgcttttaagaatatctcagggtttggtttagagtttacaacatcatctccacaaactatagcatcaaagtaatcttttaaatttgccttagctaatctctttactgctctttctctctttgttgatgttgcaacagccattttgtatccattttcctttaaaaaagagattagttcattgactcctaatttgataggagctcccttcctctccataaattcaatcatatttttagttttttcgtcatataaatctattattggtacagaactatcgtatatatctgtaagaccttctattattcctttacgatttcttcccataactgatgtataaatttccttagtcatagtatatccatacttttcaaacgtctccatccaaaattcaagagaaattctctctgagtcaaacaaaactccatccatgtcaaaaataattccttctactttttgcatacaattcctccaatattttttgatataattatattacactttttatgattaattttacaaccctcaatttatccaattctaatattgtaaaattgtaattttcaaaagttacgctttggtttactttaatatttgaaccaagcatataggatatccacccacctatactgtcaaatccatcatgctctatatcaagtccaaaatacttattaatatagttgatagattcagttccatcaactaagtaagaacctgctcctattttcttaatatgagtctcttctttgtcaaattcatcttgaatttctccaactatctcttctagtatatcttctattgttaccacaccagatgtaccaccatattcatccacaactatagcaagttgaagtttttcctttcttattctctcaagagctttatctatagttaaattttcagatatatatataatatctctcaatatttcttctagttcaattttattttcatttatcttttgattgtataaatctcttatatgtacaaaacctaatatatcatctttattttttctgcatactggatatcttgtaacaccttcctcttttaaaatagctaatatcttttcttcagaatcactttcatatatacataccatatcagttctaggaaccattatctctctaattttcttttcttcaaattcaaaaatattatcaactaatctttgctctgattcatctataagtccacttttataactttcttctactaatagtcttatttcgtcacctgtatggggttcatcaacctcatcagcttgtgaatatccaaatggtttaagaaataaatcagtacttaagttgaaaaaatatattattggatatgttaacttataaaatcctactaataaaaaagatgtactcaacattattttttctgtattataaagtgctaaagctttaggaaccaactctcctattacaacctccatcattgttataattaaaaaagaaatggaaattgatatagtatatataatactttcactaagattaaatacacttactattggtaaaattaactctttaactgtagattctcccatccaacctaatgcaagtgaacaaagtgttataccaagttgacatgcagaaagataggaatttaagttgtcttttattattttacatctttttgcattattattaccttcagttatcatggtatcaatcctagaactacgaagttttaccatagcaaattcacaagctacaaaaaaagcatttatcaaaacaagcattactataagtgttacttttaataactcccgcataaagtattggttcttataatgtaagaaatctataagaactcaaagttccccccttatatttataaatttaatttataatatatattctatcatatttattaatatatcctactttattacaaataatttttataaactaaataacccctttaatatttatgactgtctatttgataaatattaaaggggttatttagttatcattttttatttctaaaaatcttttctcaaatgatttagttatctatttatccaattttttacataatttaatgattaaaaatattaattttttcactataaagtataaatattttttgtataaatattatctgattattaaaataaatattaatactataaataaaaacgaagcatgatttttatttaaataaatcccaaacttcgtctttacttacttagatatttatttactttctaaatcctattatttttaaaaccttatctttttaatacttcaccacatttattctcagtaatctctccattttctaacgcaatttttccatttacaattacatattcaacaccattggctagtaattgtggctttgaaaaatcaatatcttctgacctagaataactatagttatccatgtcaataactgctatatcagctatcaacccttctttaataatacctctattttttattttaaattgcctagctggtaatgaagtaactcttcttacaatctcttccaatctaacaccagactttctgtacatattgaagaaaattggaaaagctcctcttctttgtagttcaaaccatgacatatccccacccacactaaacaaacaatctgaaccaaccataacaaatggattatcaattattttattatcatgtagtttatctgggaaatcagctctatacattcctcctaaacaaaagataagttcttcgtctccatctaaaagtaaatcgagtaataacttgtcctcatctattcctttttgtgtagctatttcacgtattgatttcttttccatattaatatctttagtgtttagaagtattatactccccctatctccaagtataaatgcttcttttaatataagtgttcttccctcttcatttctaagatcatccattaccccatctatacctaattcaaatagactagatgatattgccataataaattgaattactctttttttcttcatacaatgcccagaacttcttggtactgtgtcaaccattatttcaacaccattatacctagcctttaatatctcatcaaatgcttctatttcaactggacttaagtgagatacttgaaccctagcaccacttttttgcccaacctctatggcttcttttactgcattatatcttcctatgtaatctctaatatgagatgtatatataccatcatgctctttaatctgccttgcaatatcaacaagttcatcaatatcagcatacttacttggtatatatgccaatccagtagatattccaaaagcaccacttttcattccatcatttattatatctgtaatttcatttttttccttttctgtaggaggtctatccttagaacctcccataacactccatcttatagtcccatgccccaacaagaatcccatattgacagaaataccacttttagatataaggtcacaatattctgtaaaattattccaacatttatttttatctataagatactttttttcttcttcaagtaatagaccatttttatacatatattcatatacattttcagaagaatatggtgttatagaatgtccacaattaccatttatagttgttgtaactccttgttttagaaacttttcaaatttaccatctagtattgctactatttcttcatgaacatgagggtcaataaatccaggtgttataacttttccacaacaatcaatctctttatttgtattgctatttatcttagaatctatttttgctattaagttgtctttaattgctatatctccataaaaaccaggattacctgtaccatctattataaatccattttttaagattaaatcatatatcaaaatattccctccttaaaaaccaatttttaaataatcttaatgtaatttttatatttgaaaatcaaattattatatttcatatttgaaaattcactattatttcattgtaattagtcactaagcttatctttatacatagctcttgcaattaatatagtaccaaatacacatataagaactactagagactgtggtattataccttgctttgataatataatagtcaatacagatattacaattgctactagacctaattttttatcttgtaaaaatacttgtccaaaaactgacccaaatagagctggtaaaattaagtttaatttttctactacttcagctggaattttagataatacgcttcctcctaaaattacccctatagttagtatacttatattcactaaaatagatacagctattcctattgtagatattatcgagccttcttctgtacctgattcaacttctgctgccttttgagctgctattgaacatggtagcctcatattagatatattaccagaaagaaaactcatataagttcctgggatacctaagattggtgaataagaaactggttctattatgtaatttggagcactcatactgacaattgccattgtacttgctaataatgctgatattggaggcataataccaaatccaaagctcaaaattattccaggaactaatgctgctataatacctaaagatagtgttagtcttccataccttatcataaaaggtaaatattcttcattgtatatagattttactttactcataaaactccccccttatattactgaagctattatcattccgctaaacattgatattgtaagcccccactctcttaaccattttatatttttcttcttttcaagcatacacaatattaccattatagccattccacttatacatgcaattgttccattatcaaaacgcaacaccctatcagcatttagatatgcaaatgaacccaacattgctcctagagatattattggtataaatgatttcttgccactagatataacattggttatcttatctagtttatgtccaaatagtaatgtgaatattatccatcctaaagaacctaatatcatagtccaaactgcatttgtaaatgcaagttttgtcatttcaggagaacctaaagttatacctaatgcatctgttccaaatccagctgacattgattcaaaaattacagaacctataaatgataatctcatccatgctataggcccacccatagttactataagcgataccattccagcaaatatagtcattgaaggcccaatagctgaaatagcactactcttaacagctgactttatttgtttatctgttattcccattgttttaccaactttgcaagattttatagcaaatataagggattgtaccactactattgatactgctactgtactcgctatccacaaaagtggatgattagctaattttaaataatccatttataaaacctccctataaatcctcaaattttattaatatttctaatatatctatttccaaacctgttttagtactctaagtatatttccacctagtaccttctctatttcctcatcactatatccatgctttactaaatatctgacaatgttttttgaagtttctgttgggttctcaagaccttttacatattctactttgggatgttcttttgtacctgttattttttttatatcaaatttagcagctagtactgagtgtaattttacatggtcgccatatactgtatctggtccaaaagctacatggtctattcctactaaatttttaatatactcaaaatgttccataaatgactctattgaatgttctttattcttctctgttattgtagtatgaggtgctgcttctacacctataacccctccttttttagcacatgctattaatacttcatctggagttagtctctttgtgttccataaatttcttgccccaacatggcttaatattattgggtccttgctatattctattacatcaagtgtagtttgaactccaacgtgagagcaatctattgccattccaattttattcattctttcaacagctttttttccgaaatttgtaagacctccatctttctcttcttttagtcctgaacctaatgcattggattcgctgtatgttatacccattaaccttataccaaatccatacagtatatctattctatcaagttcattttctattggtgctgcaccttctaatgttggtatcaatgctactttaccttcacttttagctctgcatatatcttctactttttcacactttatgacaaaatcttgatgagctaaatcacatagtctcatgcctaaatctattaatatatcatcccatttccaccctgaatttgatgttatcgtacatacaccatccattaaattatcaaatatagcatcataatatcctcttgataatgcttcataagcgcatctttgtttaccttccctattatattcaaatatatctctttctaggtgttctggaaataatactggatgttcatgtaatgatataaatattttttcatccactatacttttaaccttagcttcttgaatatcatctaattcaataaggtactctttaactcttttatctcctttacacatctcaatagatgaaatatcttttcctttttctaaataactataggcttcatatcctttgtaagctgacttcataacaacatcctccaagttctacaattttttatatttttcctatgtagcaattgatatgccaaaatataaattttaattgtataataaatcttgcaaaaaataaaaacagtagtaaggttgatatttactactgttttattaaaaataatcttcttagattatttattcaatatttttgaattatcttaatcttaaagataattttatttatttctatccattatagggatttttttagggtgttttgcctttttagtcccctatatcactcccttaatttttacatatgatataaagttctttccttcatcagttataaaactaccttgtttttttactccagataaaagtaaaccatggctctttaacttatctattctttttctaatttggtctacacttaaaactatatctttttcttttaaaatctcttgcagtttatttcttcctaataatatatttttattattccaagtttctatactgttcaatatacatatactttcctcaaagaaattagattgtttgaaatctaagataattgaatcgaaattttcattaactaaagtattgtttttttcaaatctaaattgttctggcaaatgctcgtaatctactctatcttcctcaactatagtatcaatataataaattaaatttttaagctctcttacatttcctggccattcatacaatgttaaagcttgcattgattcctctgtaaaacatttgttgctatttatttcatctaaaaaatacttacttataagaggtatatcttccttacgttctctaagtctaggtatctctatatgtaatacattaatcctataatacaaatcttctctaaaagaaccttctttaatttttttctttaaatctttatttgttgcagctataattctaacatctattggtataattttacttccgcccattctcataacttctttttcctgtaatactcttagcaatctctgctgtacatctaaagatatatcacctatctcatctaaaaaaattgttcctgtatgcgctctttcaaatatacccatttttccaccttttattgctcctgtaaaacttccttcatcatagccaaaaagttcactttcaataagtgtatctgacaaagaagatagattaactgcaacaaatggcttgttttttcttagagattcattatgtattgcctgggcaaatatttcttttcctgttccattttctccaagtatcaacacagaaaagtctgtagttgctatttttcttgcaatattaattttttcttttattattttactctcacctacaacactctcaaatgtatactttgatacaaaaccttttgactgaagtttattttgaatcttgtcctcaagcacttgaattgcacttatatttttaatgcttataatactctttattcgttcattattttcataaacatttactttattaattatcagttttttgttatttaaatttactacttcatcattaacttcatcttcttgaaaaaatatttttttgacaaccttatcactaaataagtccataaagttattagatataatttcattttggtctattccaactagattagaaaatactttgttgcaatatataaattttcctaatttatcaacagaggcaataccttcatctataatctccaaaaaactcttcatggttttattcatagttgtataatacctatatccacttactgtatcttcattgtatttttccttaataatatgtaatttatctatagatatatttagttttgtaaagatttctataactgtatttatatcaattaccttatcacctatgtcaattatttgctttatgttttgtggtatgctgtttctgcttcccgtaataattccaatctcacatttagacttatcacaacctggataatatggtattagattaatatgaattaatcctagttttctaattatcttggcagtttcatctgctgactctttataagcatctataaccataacatcagaatcattttctatacttattatctgatttatattttcaatatttatagtacgatgtactattacaataagtatatttttatcaatattattatgtatatattcctttatatcattgtctgaacatactacaagctcatagcttgacagttcaatatttatcctatttacatataccaagttatctatattacaaaattctccaaatatattttccaattgttttgatatatctatatttattttgtcatcagttgatacaaataaaatattatgttttttcatagtcccacctcctgtttaacgagtatagaaagtaataatttggtctattgtagcactttttaaaaaagttttaaatcttaaaaatcaaattttgtaccatttactattattttccataataaaataatgtaagctatcttttttcacatataatttaatttctaaaacggttagtttgacattattggaatataaacaaaaatttaatataaattcgttaatatattaatacatttttaagaatgacaaggaataaattataacaaattttaggaatatataataatagggtctcagaacttagttacaagttctaaaaccctatttgtttagtgtaaaaaacatcataaaatttagcttaaatcttttcacataatattactctttttctaagtgataataaaatatatctattcctctaaaaactgtaaaaattcctgattaaatagtttaagctcatcatagaatatagcatgaccactatactcaaaagtatataaaattgaatcttctattttttcattcataaaaactgcaaattcatacggacatatttcatctaatttcccatgaaatataccagtaggcactcttacacattttaaatcattaaataattcttcatctcttaaagatacagcagttccaatagtgccaatacctgatgcactaaaaccaatatcattaaaccatcttctaaagctttctggtggatttgatgcaaatactttttctccaaaatcggttaccatttctggtctatcagtacatgcttgtgctatcaatttatttacatcttcacgtgtcataccatatggaaattctggaggtctttgtacaaatgatggtgcagcagctgcagctaataccaattttgacactccatatccattaaataaactcatatacctaagtacgattgctcctcccattgaaaaaccaacaaaggtaaagtcttttaatccaatagcatgtaccaccttataaatatcgtctgctaattggctataagtatatcctcctgatgttgcatcagatttaccaaaacctcttaaatcaattgaaactgttctatatccgagttttggcaatatatttgtttgatattcaaatatcttatgtcctaagggccaaccatgtataaaaagtacagtttttttagcactcggattcaaatcatatactgctatgtttatatcattcacatatacataatacatatcaacagcaactcccttcaagaaaatgtatgatggttattttatatatatgaataaaatgatgaataactaaatttttaaatttatttacaatacttctctattgccttttcaaataaacttacatgaagtttttcatctaggattattctatttaatatagcttttatataagggtcttcaataagacttatatctttataataattattaatagccacatgctccaaatgcaaatctagttttaatctgttacaaatagaatttccataacatacaaaaccaccattccaatatgcaccacaagaacttgtagaacctctatatacaggatttccacccaataatcttatagtctttgctaatatctccatatgtaacatttctgttatagatatatttatccacatttcacttaactctctatgcgtttcatctaaatcaaaattatggtatagatattgatttacactcgtaaattcacttgatactccggcatagtcatccatcaataattctgcataatacttatttagacctaaaacttttatctctggatatggctcatcacttgaatatccatttcgcttgtgcatgtcgtaatgtgcatcactcataatatctcctcctttaaatttaatacttgatattaattgtatgcatcacgactttttcatataacttagataataaaatctattatattattttctattataatttatgtgtcaattcacccaaatttatttgatatgcaatatttctttccttagtgctacatatgtaataaaaacatatatacaatatattactacaaaattaataagcgtaatggctacagcatgtaagataggaatctgaatattaaaaaatactggagcatcaaaagaaatattaaacatgttgtatgaaaaaactgataccaatattccaccaaatattactgcaggaattaatggaatcgaaaaatataaacaaacatgtttctttaagatttttattacttcactatcaatcatccccaaagttcgaagcattccatagtgttttatgataatgttattttcgctcaataattgaatagagagaatgactgtaccaataatgcatataatgagtgccaaataaaaaagtggtaatatcaagataatggcttgaccagtagattgcatagcatactttccacttatataatccttattatcatatcgtaatttagaaacaaagccttgattacctgctactactactccagaattaagattttctaaagtatcaaactttttctgaaactcagtaaaataagcactatccaaaggctcacttgtaatagcaacataaagactatacagaggtttcatattatcaattaaataatctggaatgacaataatatattcttgtccatttccatatcctccatactgtgaaaagttctctatataaatacctgcaatacttaagtccttatctgatattgtcagtttatatttttctccaatataattcttatatgcatcagcaagataaggcatacaatggatgataaattgatttttgtccatctttattgggtttaaacccaacatatttcttagtatattgtaatcactatatttcataaatgtgtcaaactggttttctgcaaaagtataatccttatattgtaaatctcgccctatatctttcaagtatttagaaaggatattattacgaaccttcataaaggatgttttttcttctgtgtaaagagtataagaataatcctttttcacacctttcgtttctgataaatatccttcatatgaagaaaaatcatatgattcattcgggtgaaaaatactcacatcaaattgttgtaaatccactgatttattcatcacagaataaaatgagttagctattccaatacaagcaattgatactgtaaaaagagttgcgataatacccattataatgcttattccatttatctttgaagccagtagacgatacaaaaataagtgagatttcttatatttccaattcatccctttttcaaacatattctgtgcaatagatccaaatcccataaataatacgattagacaaaatacaatcaacaataaaccaagaaatacatctgttaatctaccactaggtattgaaaagaaaaaaatacccatacctccacacaaaacagacacacaaaacataatagacttcgtttttgtttggtgaattaatacattttcattatatcgatcataattaagcaaattaattaatttcattttaacaagttttttattactttttaattgagcaattaaatatattatgcagaagtataaaaaagtcatcccagcagcttttaatgaaaaatccggagataaagaatactttccatgaaacatattaataacaatagattccaaaaccttagaaacaaatatccctagaatccatccaacaataagagcagaagcacctaataaaagattctctataaaaagcattttaacaatttgttttttatctactcctaatatcatataagtacttatttctctgcttctttttttcaatataaaattcatcatataactaacaaaccagcctaaaataaaagtaataatgaacgaaaatatgataatcatataagaaaactcatcgcttcctccattattaagtatactagaaagttcttgcattacgtcggaaaatatcaaagcgttaaaagcataaatcaaagctacagagcctattaaggaacaccaataaataaggtactttcctgcttgtcgtcttgcattacgaaaagataatcctttcaacataatcaatctcctcccatcaaagaaagtgcatccaaaatttcgtgatagaaagtaagtctggatttttctccttttctaagttcgttaaaaattttcccatcccttagaaataaaattctctcagtataactagctgaaatagcgtcgtgtgtgacaagaagaatcgtagcctctaatatggtgtttatagtttccaaaagttccattaaagttttagatgaattagaatccaatgcaccagttggttcatctgccaaaataagtttgggctctgttacaactgcacgagctactgcacaacgttgcctctgaccaccagatacttcataaggaaacttcgaaagtatctcttcaattttcaattgtgtggcaatattatacacactattagtaatttcaacaggagaaactttttttattgtaagtggaagtgctatattttcttctaatgtcagagtatctaataaattagaatcctgaaaaacaaaacctaaattatcacgacgaaaaacagttaagttttcttcggatagttcagtaatatcttgattttcaagataaatttttccagcacttactgtatcaattgtagcaatacaatttaacaaagtagttttaccagagccagaagttcccataatactgacaaactctcctgtattaatttgaaatgacacatcattcaaggcctttgtaagtattttctgattgccataatatttctcaatgttctctactcgtaatagcatgttaaagtcctccttagtcaacaatttttccatttttaattattattgtcttatctgaaaaattcaagatatatacatatatgctttctttagagtcttgaatttgaatagtaggttcattagatgaaattagagatttttttacttcaatatcgtattttattgttaattcattatcatctccatttttattagtatcttctacatttttatttaaatcaatgttattatgattaaagggaccagtaaactttacttctgtaatagttccattttttctaataaaagaagcatattcagaccttagtggtatgatacttcgtgagaaaaaacccatcgaatccaatcctgtaattgaaataaacaaaacgagtacaacacataatatagttaatatcctttttttcatatgtttctccctcctttctattgatattgtagcgtaaatagtaatctgaatatatagaagttacttaactttatcttacagttttgaaagataaagaaatagcagcgcatttttagttgcactgcttctgcatattgatagctgtatttattgggaaattcaatgttattgctgtgtattcaccaaggctggaggacacatctatatcaattcccattttcttagacagttcataacaaaggtaaagaccaatccctgtagaattgtttgtagtccttccattactgccagtaaaacctaattcaaaaattcgataaatttcactttctttgatgccaataccattatcttttatagtaaacttaacactcttgtcttcttttattgcaaaaaatgaaatttcagctgaatcacttttgtactgaacactattgataataatttgatttaaaataaaaactatccactttttatcagtatatacactatactccaaatcctgtatattaatatgaatattattttgtataagaagcaatttattctttgctaatacttcttctacaattgactttaatgttatttcagaaattaaataatctttttcaacatggccaaggcgagcatagtacaatgcacgctcaatatgacgttctatttcttccatttgaaaacgaatttttcgtgtatgttcatttttataattttcacatataagttctgatgttgtaacaggatgttttatctcatgtacccattgttcaatgaattgtctatattcgtacatttcacgatgtatttgagaaacatgatctgtcatagatttcaatgataatctaataatattgtagtattcacgttctatgttagaagtaggtttttcaatcatttcaataaacagatattttttatccaattcgtctacaatgcgacgtaacttaataatttcttttttctgtttttgataacaaaaacatatccaacaaaataaaattgcgacccaagcggctataagaagagtcaactctccttgaccaatccctataagatgaagatatagcactaatgaaattgcacaacaaatatttaagagtataactaatactttatcttgaagaaaattacaaaacctcatatcctatatcccatcccccgttttgtaatgattaagtcagtaatacctataccccttaacttttctctaagccttgtaatgtttacacttaaagcattatcatcaatatgaatatgattgtcccataaatattctaccaaatctatacgaggcacaatactccctacattctgaaacaaataatacatgatttttagttcagttcttgaaagttctataacagcattttggtattctactgtagctgaaataaggttgagtataatctctctatatttaattttctgtttatctgatgaatctactcttttaagtaggttctttacccttgctaaaagcaaaggtaagttatatggttttgtaatatagtcatctccccccatagtcaaaccatttagttcatcaattgcactatctcttgctgtaataaaaataataggtatagtagaacaattcctaatctgtctacataaagaaaaaccatctatattaggcaaattgatatccaagagaattaagtcaggtgttgattcttggattacttgaagtacatcacaattatttgtatccaatgtttgtgtactatagccattattttcaaagaattgcattaattccttacagatgaacacatcatcttcaattatcaaaatattggttaaaataataaatacctcatttctttagtttatattgctttaattttgtaagtaatatatttttccatatattacttacaaaattactttttaattattcatcttttccagctactgatagctctttaataacaactgaaggtgaacctatactactcattggaaattctaaatcttcccctataacttcaatatctttcaacaggtcaaaatagtttcctgctactgtaatttgctccactggaaatactttttttccttctttgatataaaagcctttggcagctaaagaaaagtctcctgttactgaatttgcacctgaatgaagccctgcaaagctagtaaccatcaatccttcatctatatcctttataatttcatctaaagatttatctcctttatctatataaaaattagttggatatatgcttataggtgatgaatatgaagattttattccatttcctgtagtctttacacctgccttattagccgtttttaagttatgaagtaaagttataagctttccatttaaaacaacttcttttttaaatgtagctactccttcatcatcaaaaggagtagatgccataccattttctaaaagtgggtcatcaactattgtaactataggagatgctatcatgtctccttctctatttttcaataaagataatcctttttgagctgaatctgcattaaatatcccagaaaatgtgctaagcaaagataccatagcttcattaagcaatatagttttatatttacctgatggaatactcttaccacctactttagataaagcattatcaacaccaagttttgatatctcacaaggttttatttcttcaatagaatttgctctattatatcctattccatcatatttttgtccattgtcttctatgataggaactacaaaccctataagcatattagttttattgcttaaattaagacctttagtattagatataccattacttgatacagaataagatatagtacatttagataaatttaccaccttatctgaataagctttagtctctctttccatttctaaagctaaatcaatcaacttatctgcctctaaattttctagctctttagaataagtctttacatcattatagtgcttatctccttcatatataaattgtacatcttcattttcaatagtgtttactccatcttttacattttttatcaacatatcaacagctttatcatctaaaatttctgtataagaataacctatctttccatttaccttacctctaaaagataaaccaaaagatttatcaagattgtatttctcaacttctccttcatatatatttatacttaaattttctcctgtataataatatatttcacactcttcaaaaccttcacttagagcctttttaaataatatatctttaaaatttttaagttccacaattatccctcctatcttccacctacagtaatttcttttacccttatcataggttggcctacattagttggtatacttcctgatgatgagccacacatcccctgagcttgttttacgttattcccaaccatatctatattcataagtatatcgctaccttttccaattaaactagcacctctcactggctcttgtatttctccattttttattaagtaaccttctgaaactgcaaaattaaactctcctgttacaggatttacagaaccaccacccatttttttagcataaagtccatctggtattgactttataatgtcttctggtctatcttctccagcagcaatataagtgttagtcatccttgaagttggtgcaaatttgtagttctgtctacgagaacttcctgtaggattcattcccattcgtctaccattaagtttatctatcatataagacttcaaaattccattttcaatcagtatattcttttgagttggatttccttcatcatctatattcatagaaccccagtagtttggtattgtaccatcatctatagctgtaatctttgtggaagcaatctgttgacctaatttatctgcaaatacagagttcccctttgcaactgatgtagcttccaaagaatgtccacaagcttcatgaaatattactccaccaaatccattatctattgctaccatcatattacctgcaggacaatttttagcatgcaacatagtatgcgctactctagctgattcttttgcataatattctgggtctatttcttcaaatatttcaaaccctttacaacctccaggaccttcaaatccagtttgattttcattacccttagatgcaattgaacttatccctagtctggttcttattcttctatcctcaacatatataccttcagtgtttgcaattaatattttttggtctttatccaaatagctaacacttacttgagatatatcattactaaattcttttgcactcttatatgcaaccttcataacacttactttatctctatttcctattgaatttggataaatttttatattatgtatgttatttattttaatactgtcatttaatattacactttttccatcttccaatttacctaaagcaacagcagctttgtatgctacatccaacagactatttaatgaattgtcacttgtataagcatatatactcttcaatcctttaaatattcttattcctataccataatttcttccacctattgcattttctactttattatcaattaaactaatagaattatttatagtgtcttcttcaaaaatctcagcaaaatctcctccagtaattagacacttttctaataccttagaagctatattttttgaaagcataaatttacctcctactttaaatttttaattaacttttattcaatctttttacttgttaacaaacattatatactatattacttaaaataaggtaattatgaatatattatacatatgttttatactaaaatgttatcacattttatctatacatacccatataactagataattaaaatgtataatattatttgctatagaaaataatacactcatacataataaattttaggagtgaagtatatgaatcaagaatatgtaaaaggaaatcctatttttactaatattaataaagttccaagacaatttccataccttactgatgatattgatactgatgttataattgttggtggtggcgtaactggatgtatttgtgcttactatctagctaaaaacaatataaagtctgtcattcttgaaaaaggaaggattgcacatggaagcactagcgtgacaacttctctattacagtatgaattagatgacaatttgatagatttaacagaggttatgactctaaaagatgctctaaaagcatataacctttgtacttcagcacttgaagaattagatacatttataaagctatatggaaataagtgtgattatgccaaaagagatactctactttatactgccaacaaacttgaaattaaggctatcaaagaagaatataacttaagaaaagaaaatggatttgatgttgaatatattgatgaatccacaaacccttttagctttgatttaaaatcaggattgatagcaaagaatggaggacgagaattagacccatataaatatagtcaccatttgattgatgtaagtttaaaaaatggtcttcaagtatatgaaaatacagaagtaaaaaaagtagatttatcaaatgataaggttactgctgaagtatcgtatggatacaaagttcatggtaaaaaattaattgtagctacagggtacaatacaagtttatttacaaaaagaaattttgcaactaagtcaaatacttttaatatagcaactaaaccacttaaaaacatagcttcttggaaaaacaacattttaattagagataactgtgacccatataattatctaagaactactaaagacaatcgattaattataggtggtgaagatgtaagttttgatgatatagaaaatgaaactttagccaatgaaaagtatgatattttagaacaaagattgaaaagtatgtttaaggatataaaagacattgaagttgaatataaatattgtggttgttttgcttcaactttagataatttaggttttattggtccagataataaaaataacaatctatggtattgcttaggttatggagcaaatggtatactctttgcaatattaggaggtataatgttaagtgaattatatcttggcaaacaaaataaaaatatgaaattatttaaagtagatagatttgataaatagatattgtatattaaaagactataaaaagatgaaactttataattctaaaagttaactttgatacagtcttttataatgttccttttaaaaatactttatttataattaaatataaagtaaaatgttaaaatataactgataaaatttagtcataagataatatttaagtttatttgatgaaatatggaggaattattatgaaagaaatactcgttattgctcccactaaaggaacctatgaaaaatcaattcacatagttaaaaaaaacaaatatacaaatattgatgttgtatttggcaatctaaaagaaggtatacctcttgctgaaaaaagtattaatcatggtactagaattatcataagcagaggtggaacttacaatatgttaaaagctacttacaatatacctatagttgaaattaaagtagatgcttatgatattataaaaagttacaaagaggtaaaaaattccaacgaaccatttggaataattggatttaataatgtcatctacggtttcgatattatagaagaaatattgaataagaaaataactatgattgaaattgaaaaagaagaagaaatttatgatgctatagaaaagtacagaaagaaaggtataaacacatatataggagataccactgttgcacatattgttaagagacttaattgtaagggaatattaatcgaatctagagaagaaaacatacttagagccattcaacaagcagaacaaatactcgaagcaaccaaggatgaacaaaaaagaagattacagatagaagctatgacagattttgtacatgatggaataataacagttgataaaaattttaaaataacattatttaataagagtgctgaaaaaatatttggtataaaaaaagaaaatgcactttatcataatgttgtagatgttatcccaaacacagttcttccacaagtagttgagactatggaacctcaaattggtgaaatacaaaatatagggagtacaaaaattattacaaatagagttccaataattgttgatggccagattcaaggggctgtttcaacatttcaagatagcaaggagataagttcttttgaacatacaataagaaggagcttattaagcaaaggtctatctgctaaatacacttttgataatataattcatgctagtgaaaagacaaaagattgtatagaacttgcaaaaaaatatgcttgttatgatactcctatgattattactggagaatctggagttggtaaagaattattttgtcaaagtatacataactatagtaagcgtaaaaatgcaccttttgttgctgtaaattgtgctgccatacctccatctctaatagagagtgagttttttggttatgaggaaggttcatttacaggtgctagaaaaaaaggtaaagcaggtgtattcgaactagcacatgaaggtacaatcttcctagacgaaataagtgaaatccctcttgaacttcaaggtcgattattgagggtattgcaggaaaaacaagttatgagaattggtggtgataaagttattcctatagatgtaaaaattatctgtgcttcaaataaagacttaaaaaatatgatgcgcaatggtttatttagacaagacctttattttagaataaatatactaacattatatcttccttcattaaaagaaagaaaagaagatattataaaattatcagaattttttatacataaatattcaagcaaatacaataaaacgcctttaattatcactccaaatattaaaaaggcacttcttgaacgagaatatgaaggtaatataagggaattggaaggtatgatggaaagggctgttattgtggaatcatttgactcgattttattagaaaaggttagcaatgaatatacaaataatatagttgataaagataatagtgattttgaatgcagtaatttagatttaaaaactttagaaaaaaaatatatctataaaatttataacgaaaataatagaaatactacaaaaacctgtgaaattctaaagataactcgctccactctatggcgtaagttaaaagaaatagaagatgatgtttaaaaataatacatacctatatatatcaaaacgttttatgtttaattttaatacataaggcgtttatttgttttcaataaaaaatacaattatatgataaaaagaatctttgtaagtgaaattctcatcaatcatacctttaattataagtaatctacagcatttcaatcgattattaaaaataatcatgataactaaaaatacaaactctatatattggcatagtaattgcttttataatacctatataaaaatgaaagggagtgatactagatgcacatcttaaaatcagtgaaaaagataccaggaggacttatggtctgtcccttgttattgggagcactatttaatacagtatgtccacaagctcttgaaattggaggattcacaacatccttatttaaaactggtgcaatgagtatacttgctctattttgtctatgcaatggagctcaaatcaatatcaggcaagctggtaagccattgactaaaggtatagtacttacagcaacaaaatttataattggtgcagtattaggtattattgttagtaaatttattggacctaaaggtataattggtattacacctcttgccatagttgctaccatgactaattcaaatggaggtctatttgctgctcttgcaggtgaatatggtgactccacagatgttggagcaatatctatcttatctctaaatgatggtcctttttttacaatgcttgcttttggagtaactggacttgcaaatgtacctatagtagcactatttgcagcacttataccaatactacttggatttatacttggtaaccttgatgaagatatacgagaatttcttgcacctggtacaacattattaattcctttcttcgcttttcctttaggagcagcattaaactttaatcaaattataactgctggactacctggagttgtacttggtttaggagttactataataacaggtatgggtggctactttgtaatgaaacttatacgtgcagaacatccagcagtaggtgcagctacaggtacaacagccggaaatgcagctggtactcctgaagctttagcagctatagaccctactctagctacaatagcagctgtttcaacagtacaggttgctgctgctattattgttacagcaatatgttgtccaatgttagtttcctatctagataaaagagaaaaaaagaaaaaatctatttttaaaacaaataaaaatattgaagtaaattaatacttaaggaggtaaaattaatgaatgcaattattcatgcaaatgaaaaagataatctagttacatgtgtcagacctttagttaaaggtgaaaaagtttcaattgatggaaagtcttacatagtaaatgataatatacctgtctttcataagatggctacagaagatgtaaaaaaaggtgatgttgtatacaaatacggtgaaattataggaattgcaacagttgacataaaaactggtgactatgttcatgtacataacattgaaagtacacgtggtcgtggagataaaaaataggaggaagttaaaatgaaattaatgggttatttaagagaaaatggtcagtttggtattcgtaatcatgttttaattattccaacatctgtatgttcaagtgagacagctacaagaatagcatcacttgtgcctggagcaatagcaatccctcatcaacatggatgttgtcaaattggttctgatatagagcttacagcaaagacattaataggatttggaaaaaatcctaatgttgccgcagttttagtagttggtcttggatgtgatggtattcaagcaaaagaattagcatctgaaatagctacaacaggaaaaaaggtagattacgttgttatacaagaatgtggtggaacattaaaaacagtttctaagggaactgaaatagtaagtaaaatggctcgtgaagtatcaaaagaagtaagagttgaatttggtatgagtgaaattacattagcacttgaatgtggtggttctgacccaacaagtggaatagcttcaaacccttcaataggcgttgcatcaaaccttcttgtagatgaaggtggaagtagcatactaagtgagactacagaagtaattggtgcagaacatttgttggctacccgttttgaagatgaagaaatgaaagataagtttcttaaatttgtaagtgatgtagaaaaaagagcaattgctatgggagaagatttacgtagtggtcaacctactccaggtaataaagctggtggactttcaacaattgaagaaaaatcacttgggtgtatgtataaggcaggcaataagccattcaaaggtgctcttgaatatgctgatattgtacctcctgataaaaaaggattatattttatggatactccaggtcaagatatagattctatcactggtatggtagcaggtggtgcacaaattgtaatcttttcaactggtagaggtactccaacaggaagccctatttcaccagttattaaaatcactgggaatagtgatacatacaacaaaatgccagacaatatcgatataaatgcaggtagaattataacagatggtgctaaaatagcagatataggtcaagaaatatttaatgaaataatagaagtctgtaatggtaaacataccaaagctgaaagtcttggtcatagagaatttggcatttacagaatttcatctacattttagattgtaacaaaatatcttttataaatataatacttatgtagatacataagctaaaagttctttctaatcctataaaaattttctatactgaaaaggaactgtatcaaaattattttgaaaacagttccttttttaacctcttttactcaaaatattataaaataagatttaaacaataaacgtgtcttgattaatctctaagaagacataaataaagctaaatgtaaagtgagataaataaaatttaatatctttgtatgaaaagatatttggtataatatgtctgagagaattcttatttgtaaacaaataaaggatggaggatgaaacaaaagaatgaactttgaaaacacaaaaaataaaaaaataatagctactttactattgacactccttttaatcgtgtcattaacatgtgtcaattttattatgaatctaaataaagtaacacataatgaaacagaacgatatcttgtagaagtttcacaaagtatttccactacaattaatgtgaaatgtaaaagtatatttaggacactatattctatgggagatacttattttgagattaatgatagtgaaaaagaagtcaatagatacttatcaaaaaaattaaaattatttgaatttgattggttaggtattatagattctaatggaaattttgtaagtgcccttaaagatacaggtaatgttaaaggacaagacttttatagaaaagcccttcaaggtaaagaaacaattactcctgttaaatcacaatctggtacatatggaattttatattctgtaccactatacaatggcgataaaattgttggagctgttgctgcttggaatactattgatactatgagaaatttattaagtgtagaaagctttcatggtgaaggattttcccaaattatcgaccaagatggaaattttattgtaagttcagcaaacaaaaatgctccaaaaaatgtggtaaatttttttgacatgattaaacaccaaggaaaacaggttgataaaaataaacttgaagaaatgaaaataaacttaaaaaagaacaaaactggttctatgtattatacattaaatgatggtatttctaaggcaatgcattatcttccattacaagaagaaaacttatacctcctttcagttgttccaacaaaaacagcaagtgcacagtttgatttacttctaaaaaaagcaatcttcatcaatattttaattgttatactatttttattgcttattatattgattatgtttataaatcaaaagaacagggcacaacttataaaaatcgcctatgtagactctgtaactaaaggttacagtaaagcacgttttgatattgaagctaaaaaaattatacagtcatcttcatcagaaagctattcattggtatctataaatattcagaaattcaaacttattaatgattcttttggtagtgaagcaggagataaaacattaaagtacatacatgatgtcattagtaattatctagaaccaggagaattgctttgtcgagtttctaatgaccagtttaatgtacttattaaaactattcctcaaaaagaaattcttaagtacatagaaaatatcaccaatgatattaatagtttcaataaaaatgaagaatgtaaatattttatagctctatctataggtgtatataaaattgatgacccaaatctacctttagtttcaattcaagaccgtgcaaatgttgcacgaaaaaataataaaggaaacattggaaatcatccactttatacatgtgttttttatagtgatttagagcgtttaaaaatgattaaagaaaaagaaatggaaaatagaatggaggaagcattaaataataacgaatttatagtatatcttcagcctaaaataagcctcaaagataatactattgtaggtgcagaagcattagtaagatggcaagacccaaataaaggccttataccaccagacgagtttattcctttctttgaaaaaaatggttttattacaaaactcgaccactatgtttttgaaaaagtatgtagtatgataagaaaatggatagataatggagaaactccaatgcctgtttcagttaatttttcacgtgctaatttaaataatatagattttttagaaaaatacagaatgcttcgtaataaatacaacattcctgctaagctcttagaaattgaattaactgaaacacttgtatttgaaaatctccaaaaattaattaatataatagaccaaatccatgaagaaggttttcaatgttcactagatgactttggaagtggatactcttcactcaatatgttaaaagaaataaaagttgacacatataaaacttgaccgtgctttttttagctcacctaatgcagataatattgctgaaaatcatgtaatagaatctatagttaatttggcaaaaaaattaaatatgaatagtatatcagaaggtgttgaaacaatcttgcaaatggattatcttaaaaaaattaattgtgatatgatacaaggatatgttttttcaaaacctctgcctcaagaaatatttgagaaaatgacttttggaaaaaaactagaagaaaccagtatggatagttccgtttaaataaaataaaaaacttgtctctataaaataattttaatcattttataaagacaagtctttttattttccaatttaattttattttctaaatttcttatactcggcttgttttaaattccctttttaagaataataatacgattatcatagcaataaaatctgcaactggctgtgccaaccaaacaccatctaaattaaattgaattggaagtacaatgattaatggtataaataaaataaattgtcttaaaagagttaaaaacattgaatgtttaactttacttatacactgaaaatacacaggtcctacaatagaaatccccattataggcaatgtaattagatttatgcttatacctcttactgctatatccatcaaatctgaatctttattaaatatacctacaaatacttctgggaaaacttgtactattaaaaatccaaatgacaatatgacaactgacactatgatagataatattaaagttttctttgcacgttcatattgttttgcaccataattgtatgatattatagtttgcataccttgattcaatccaaacacaggcatcataaacatcaataaaatagatgtaagtgctgtcatagccccaatagctaaatctccaccataaacctttagagaattgtttgtaaacatgtgagttatacttatagctacttccatagcaaaaggtgtcattcctattgcaaataccttctttactatatctttattcaattttaagttacatttttttagttttaaagtggacttccctcttataaaataatatgttacccaaaagaatactactatttgacatagtactgttgctatagctgctccttttatacctaaattaaacacaaatataaatatagggtccaatatcaggtttaatacacatcctacaatcattgtccttgctgctaattttggattaccttctgctctaattgcattattaagagaaaatgcaactaaattaaatatacttccaatcaatatgacactcatatagtcttttgcataaaatattgaatctttacttgcacccaaaataaaaagtatatcttctaagaaaactaatcctaatatagttataattaaagagataattatagataatgtcaaagcattacctaatatcttctctgcttcttctctatttctttcccctaattttatagacaatcttgtgctagcacctactgataccaacattccaaaagctattattagagtaaatactggcatagttacaccaagacctgcaatagctatagagccaataccttccatagaaccaataaaagctctatctactacattataaagtgaagttaccatcattgctattattgccggtatcgaatacctaaataataaaatccatattttttcatgtcttaatgcttcttgattctccatgttgtcaccatttacaccatgtcataagttatacaaattggtttatttgttcttgggtctgttgctatttctgcatcaatattaaataattcttttagattatccttcgtcataacatcatatgcatcaccttcacaaactattttacctttcttaatacctatcatgtggtcagcaaatcttgctgcattattaagttcatgtattaccatgacaatagttcttccttgttttttatttagttcatctaataattttagtatctctaattgatgtgccaaatctaaatatgttgtaggctcatccagtaataatatatcagtttcttgtgccaaagccatagctatccatgccctttgtctttgtcctcctgataaatcttccatatttctatccttaaattctgcaattccagtaacttctaaactccaatttacaatctctctgtcttctttactagaattaccaaatccacttttatgaggaaatcttccataagaaattaattctgaaacggtaagaccactaggagcttgagggctttgtggaagtacagccatatcctttgctatttctttagacttctttttgtagatgtcctctccatttatatatattttcccactattagggctaataattctacctatagttttaagtattgtcgattttccacaaccattagcccctatgatggtagttatttttccttttggtatatttaaatttaaattttttataatatctgtgtttccatatgatacatttagattcttagtatttatacagttcataacaacaccctttcctaatcatttaccaacattaaataaataaagtacggcactcctattatagaaactactatacctactggtatttctataggtgctagaagatttcttgatatagtatctgctattaaaagtaataatgttcctatcaatgctgatactggtattaatcttttatgctttggtcctattatttttctacctatatgtggagctattaaacctaaaaatgaaatactacctgctactgctgtcgatacaccagataaaattactgcatatattataagtcttcttctttgtttttctacatctacaccaagacttatagatacttcatcacccaaatttaaaacatctatatatttagatttataaatagttatacccataaaaatcactataaatggaagcacagctattacatatttccaactggttccccaaatgcttcctgatgtccatgccataaccctattaaattcttgtgttgtaaatttcaattggaatatcgtcaaaattgaagtaaaagctatgtttacacctataccaataagtagtaatcttgacgaatttataccacctttccatgcaagagaatatataagaaatgctccaaataaagctcctataagtgcaacaataggcattgtaaatacagtcaagttactcataccttcatatacattaccattcataaggtatatataaactactacaaacaatgcagcacctgaatttattcccaaaattccagaatcagctaaatcattctttgtaactccttgaagtattacacctgctgttgataatgcagaaccaaccaaaagtgctattactattcttggtaatcttaatttaaatattgcaatttcatgattacgctgaccctgccctaaaaaagtctttataacatccattggttctatagaaaatgagcccatatttaaactcaataaaaaagtgataaaaataagcaccattaaaattgatataacaagtaatgttttagaatttatttttataatatttttcatagtacctatttctccccctttctaacaaggtatataaatattggcactcctataagtgctgttatagaacctactggtgtctcatatggaggatttatcatcctacttaatatatctgtatatacaagcaatacagctcctaatactaaagagctcggtattatatacttataatctgaacctactattcctttagctatttgaggaactataagacctataaaaataatattaccagacactgacacagatgctccagtcattaatattacaagtactatacatataaatctaacaaagttagttttttgtcctaatcctattgccacttcttctccaagacttaatatagttattcttggagccataataatagctaaaataaatccaataccaccagctacaaatagcaattttataccttcccacttcactcctacaagccctcctgatatccagaaacttaattgttgagataggttaaaatacatagatattgctgatgccaaagaaattagcaatgtaccaagagcgactcctgcaagagctaattttacattattaactcttcctcttgatttagaacttataaaatatataaataatccacttatacttgctccaataaatgcaaacatcattacactaaaacttccatgtataagttgaggaagttttttttgaagtaccagtgatatcgaaattgcgaatgtagctccttgtgtaattcctataacagatggttcagctataggatttctcgttattccttgcattattgccccagaaactgctaaaaaccctccaacaagtgcagctgctattgctcttggaagtctaacatcctttactattctcatatttattccatcttccatttttatcaaactatctatgacagttgatagattcatatcttttgccccaatagttatggataatacaattccaaatacaagtacaactatacttactaatatcaacaaataagttatattttttttactcagcttagtcaattatcctacctccttttcccttttaatcgtcagtataatatcatctattaagtattttaattttaagatttattaaaaataggtgtgaaaaatgaatatcattatctcacacctactaagttaagaattactttgttaattcatttttaactgattctaataataactcttttccaattggattgtatgattgactgaaaaatggagcagcatcaagtattgttacattaccatcttttactgctcttatttgagaccagatagcactattttctaaatcttttttatctgcttctgtagcaattacaactatatggtctgcatctatatctgttaaaccttccatacttaccattggtagtgttattccatcctgttttggcatattcttaggtctagctaatttcatatcatcattgattagagtacctattccaccatcactaaataccataaattgacctgaacttgccaacactggtaaataagttttttctccattcttttctataacttccttacctaactttgtagctttttcatcatacttctgtagccaacttttagcttcttcttctttgtcaaataactttgaaacatcagttaacttgcttctccagtcatttgcataatctttcatcataactacaggagctatttcttttaattggtcatatattttttcttgtctttgactcattattattaaatcaggatttacttctaatatagcttccatatccatagtatccatcattgagtgcccaactatctttacacctttaagctcttctcttatgtaacttggtaatttatcagtttcatatgagtctacatttgctgttgcaacaggcttataacctgctaataatagttcttcactacttcctgatatatcaactatttttttaggatttgatggtatcttaacctctcctttaacagattgtacaactcttgtctctgatttatctttatcctctgtattcttatctgaacatgctgtaacaagtactaacgtagttataatagatataaatattgcaagtgattttatttttttcatgattacttctcctacttgtttattatacttacatgatattgattatcataagcacatatttattatagcatttttctatttttagtcaatattattttgtaaaaggataaaaattcctaattaatcttaattatatatagcttagataaggttttcttatattaaacagtattttttttaagaattggacacaaacacaatgacttttaggttaaacaatgataaaatgcaatttatagataatgaatttagtaaggaggattcaaaacatggtacatttagtatattgtgataatgcaggaaaaaaaggagaaaaggtcttagataaaatcttggctggaacaaaaacaatggttattagaggtgctgctggtagaaaaataccacatagtagagtatttgaagatgagttactttattttatggaaaaaggaactggaaaaatatctgcaaaagccactgttaaaaaagtagaaaactatgttaaattaacagaagatgaaatttctaaaattttaaatgaaaatcaaccaaaattaaatttatctgaaaagcaaaaagttcgttggcataaaaaatgtttatgcttagttgaatttgaaaatgttgaagaaataacacctcttgattttgaccatcaaggaaatatggatgattggcttattgttgaaaaaattgaagatgtagttgttggtactagtataccttacaattatgagaagtctaaattttaaagtatcaataacataatactatattgctaaactctacttaaataaaaaaagagtgcatttaataattataaaaattatttttatacactcttttttaataataaatttaaattacttactttctaatctttcatatacatctataaattcttctgctaattgttgaaaattcatagctgtcattaaatggtcttgtgcatgaataagtataacacttatttcagttttattaccattagcttcattttgtatcaattctgtttggaatttatgagctttatgaattgattctttcgacttttcaatacattctctagctttatctatattcccgctctttgcttcttttattgcttcaaatgctagccctttcgcatcacctgcaaatccaattattccaaaagatatctctatcatcttctcatccatttattcgacctcctaaatatctctatagcttgatatgactaatccattcttttctaaaaattctttgacttttttagatgtaagtatcttgtgctctttcgttctatcaatagcataagatgtagaatttaaaatataatcatctaaaaaagctgggtgagacataatatccactacatcatacttcattatttcgtctatattttttataaaatattcttcacttacattttccttataaaaactatctattaaaggaactactttagaatactctaaattatattcaaatccacctcttattggaagattatacttggttacaatcttctctactactggctttaaacttactaaagtatggatatgatggtgactatctaaatgagatatatctattccaagcccttttaccctatctatttgagcacaaagttctctataaatctcatcacaatccattttttcaataatttcgtctgtaatcctcctaataaaaaaaccgtctttatcaacaatagtttttaagttagataataatggtctaccacaacttaaagtcatatgaactccacaatttaaagttttattttctttaagtaagcctactccatgttctaccccaggcatatttgccatcatagaagtagacctaactataccattattatgagctgaaattattccatagttcacagcttcacaatatccaaaatcatctgcatttattataattttagtcataccataacctactttctatagacaactatctattaaatctaggaagataatctttatgagcttccaacatttcgtctaatatagtttttgctaagtcatcagatggaatcaatgggtttatacaaagtgccaaaagagcagattcataatcgccatatacagctgctttagctaccaatacttcaaatgatttgatttggcttactaatccatgcacagaatctggtaaatatcctatacttattggttttggaccatttttggttattacactactcacttctaccgcttgttcatctttaaaatctcttatagaaccattgtttaatgtattaactacttggatatcttttttgtcattgtatatagaacttattaaattacaagcagcatcactatagtaagcccctcctcttttttcaagttgaggtggttttacatctaatttttcatccttatataattcaaataattgttcttccaattctttaactacttgacctctagcttttccctctttaaactctctcaactcatcctcaagcatttctttagttttatagtagtatctatgatatggacaaggtattgcacccaaagattttacaaattcagcattaaaatcaattgcctttatattttgcatacttatatctgctttgacaaacttatcaattgcttcttttgtaacatcttctccatctaaagatacatttagaccataaaccatatgattaagacctgcaaaatccatacttattctgtcactttctacattaaatagtttggcaacatcattttttaaatgaattggcacattgcatagacctatatatcttctaaaattagtatatttgaatacagcctctgttattattcctgttggatttgtaaaattcaccatccatgcatttggacataattcttccacatcttttattatatcaaatataactggtattgtgcgaagggctttaaataaacctccagcaccattagtttcctgccccataactccatgagataaaggaatagtttcatcttttattctcgcatctaaaagacctactctaagttgtgttgtcacaaagtctgcatctcttagagcttctcttctatctaaagtaagatttattttcatatctactccagctttttttaccatcctcttagctagatttccaactatctctaatttttcttttccagcttctatatctacaagccataattcctttacaggtaactcttcatatctatttataaaaccctctacaagctcaggagtataacttgaacctcctccaattgtaactatttttagtccctttttcatctcattataccatccttacctataatttaatatactctacaaaaccctatacatttatttaccgaaataaaactacctagttgttaattttcaatttattagcttccattttttcagacgctatgacaaatggaatatatattaatattgataatattaaattaaatagtgctaaagctccaccagtccagtcacctgtagccatcgctccacctaatataggaggtgttacccaaggtattttaggtaaaattactggtgctactaatccaaaatctattgctaagtatgatacagcactacatatcactggtgcaagtacaaatggaatcataaatataggatttaaaactattggaagtccgaatatcaatggttctcctatattaaatattgcaggtggcccacctaatactatcatttctttacgtcttctcccagctattaataaagctactattaatcccaataccattccagaaccacctaaatatacaaatgcatcaaagaatgcacctgcaagtacatggtatccttccgttgctcctgcttgagccaaggcagcattttctccacctaatttcataagtatagtttctgtaaaaggaagtgctatatttgcaccatgaagtccaacagtccaaagtatatgaattataaatgcaataagcattgtagaacctagactatcagctacatttgatagcggtgctcctaaataagtatttaaaatatctgttaagaaacttccattagaaagcatttttataaatattcctattacagtaaatatcattatagttaacattcctggtattaactttgcaaatgatcttgaaactgctggtggaactccatctggcatttttatagttaatttctttaccttagataatcttacaaatatctcagttgataataatcctattaatatagaagagaataaagctgctgtacctaagtaggtttgttgtatcattccccatccttcaactactgtagttcctccctcaggaactattttaccaatttgtggagccattataaaaaagatagataaagctataagcccagattgtaacccatcactctcataagattttgctagaaaataagcaacacctattactaagaatactgccattgtacctattgctccccaccaaaggtcgcctccaaatgtggtccaattttctccaaatatacttgccatcaaatttttgtatgcttccaatggtaagttatttatcaatgttcccaaggcacctaccatagttataggtatcattactataaatgcatctcttactgctactaagtgcctttgagctcctattttagcagctacaggcactatatatttatccataaatgacatgaatttttccattttacatcctccagtacaactttattttgaactatttaactctacagctctatctaacacagcttttccattacatcttccataatccatcatatttataacttctactggaatattatatggttttgccatttcagttgcttttcctaatacatatctaacttgaggccctaaaagtaagacatcacaattttctatttcattttttaagttcacttctgatatagcccatatttttgcttctataccgttttcctttgctgcatcctccatttttgtaactaataaactagttgacattcctgctgaacaagctaacattatttttatcattttttcccctccaaattagattcattaaatattttttaagtcataaattttttaaactatacatttaaaatatgcttttctattaattttttcttaatgtatatatcttatttttaaatgtatatacatttaattcttgatattattatataccaaatgtatatacatttcaagaaaactttttcattttatttaaattttattcgacaacagcattcaaagttaatgtatatccatagtgatatgtgtgtgagtactcaaaaatctcactattttgtaacttacaaatttggcttatatataaaagtggctctggttcttctaattttagattatccatacattcttcattcgatattacagcttgtacttctctctctgacatggctatcttgtatccacacacttcttcaacaaaattataaagagaattttcacaatgagtcttatttaaatttggaaataacttaactggcatataagtaatcatatatgaaactcttgcatcattggctaatcttactctttttatttcccaaacattttcttctaaacttatattcaacttacttgataaattttcatctgcctgaactatttcaagagataccaatatattagatactttatagcctttactttccatctctttagtaaatccacttacagacgatatattatcatatatattatttgcaataactatactacctacacctctttgtctagtcatatagccttctttaactagattattaagtgcagaccttacagtcattctagttacattaaattcttcactcagctgtttttcagaagggattaaatccccttctttcaaactgtctgaatttattaactctctaacatgattttctataactttataaattggctctttcatttaattcactccttattaattaaatcttttatataataagataattttatatacaaataaagaaaatgtctatacatttaagataatttaaattttattcagacatcttgtacaactttccgagttttaataaagatataaatagacttatcattaatataccttttaatatacttgataaggttatactccaccatacaccatttagacccaacatttctggtctagatataaagtaagccaatggtactcttgcaccagtcagtatagtaattataatagaaggtatataggttctgcctaatcctttgaaagctcctgttgttattatttctaaacacataaaaaattgagaatagcctaatattttaagataaattgctcctttttctattgcctcactttcatctataaaaatagaaaatatactctctcctgcaaatactaataccaaagtagttattatcccaagtacagaagatacagttatagctattttgcaacctttatttattctagaatacttcttggcaccataattttgtccaacaaaactgcctaatgcaactgatagcccttcagccgtcatccaggaaattgcttctatttgtgagcctactttttgtactgcaacagccacaggcccccatgatgctactattactcctaatagcattgagaatactgtaaacataccactttgtattgctataggtaatcccaatttatacagaactttataatatttagtctctatttctttaaatagtcttaatttaaaatattcttctttacttttaactattatatatataaaacatgtagtaactactatctgagcaaatacagttgcaatagcagctcctgcaacaccaagttttggagcaaatccccatccaaaaattaatataggatcaagtataatattagttattaatcctactgtattaatacgaaaaggagttttactatttccaagaccgttgaaaattgcagtaaatactggattaataaaataaaataccatacctagagctactattatcaaatactgtctagacatggttataacttctaagtctcctaatctaaaaaaacctatcaattgtttattaagtactattaaagaaattgtatatattattgctagtataatatttatttctattgctgacttcatatatgatttagtagtgcttatattatttgcaccaatactttgtgctacttttatctctccacctacttttgaaatcataataaatgccattgcaagccatggaaaaaaaccagctgttccaactgcagctactgctttacttccggctttaccaacccatatcatatctatcatgttataccccatctgtataaatgaagtccccattattggaagtgatagcttaagtaatttttctgtaattcttccttctgttaaattaattctgtctttcattttccacctcttttatattaaatttatttgcttatatagctagattaatcattttatttgattgagttcactatccttcaatttatattatcatatctcaagattgcatctcaaccatacttatgtttaagataaagtattttacctatctctgataaaattaatacttatgaatataaatatagtcatttcatcaatacatattataacccttaacttaacttcaattaagtatacatactgtaatcaattagaatattttataatgtatcttccattaagaaataacaaatataagtgatttatctataattttatttatacataaaatagtatactgcaataataaaaaaactatatttgaatactttaagcatgtttactaattgtaatttccacacaaatttgataatatatgaatatattatggtgaaatttatagatatatattaattatggggagattgtgggaggttcttttcacaagacatttaagctatgaaaataaataaaaaatttaatagagttgatatgcaggtttcaatacttactgcaattattgtaataatatcttcctcatgtgtatatttttttaattatacattaacttataagagcatgatatactctttaagtgagaggtcaaaacatatctatgaatatgtagagagaaatattgataaaaatacctttactgaaattaattctaaagaagaccaatcaaaaaagtcttataaaagttctaaaatcctattagaatctgtaaaaaatactactggagtcatgtatctatatactgctaaaaaaacaaaagatggatcactagtatatgttgttgatggtttaaattcatctagaagtgattttagaaatgctggtgatttgatagaaaaagagatttggggagatcttaacaaagcattagataatcatatattgttacctaaaaagattaaatcaacatcttggggatacatatttatatcgtattttcctattcacaatgatgttggtaaggttgttggagtaataggaattgaatttgaagcaaaacatcaatacaatacatttaaatttataagtatagttacaccaataatagcattattaacttgtctaatatcagcattgattgcagtgattctatttaaaagaatatctaatcctacatatactgattttgctaatacagattatttaacaggcctaaaaaatagaaatgcttttgaaatagatatgaataacttaaacaattcaaatctaaagaatctaatatctatcatatcaatagatttagacggtttaaaaaagattaatgataaatttggccatcagacaggagacttatatattaagcaagcaagtaaaattatacaagatgtaataaataaaaaatatatagtttatcgtattggaggtgatgaatacataattattctaaaaaatttatctcacaaagaaataaatagtattataaataatattaatttaaaaatagttgaagaaaactcaactaatgaattaaaattatcaatgtctattggatatgctatttttgatgaaaaagtagatgtttctttatttgatacatatcgtcgtgcagattctcaaatgtatgataacaaaaagaaaattaataaataatatcaataataaatttaaaaagtctattctttaaataataaatcataagaatagactttttaaatttgtgtttttataagataaattatttaattaaagtttgttcttttttctaaacgattctttataaattcatatattactttcactaatatatttgtgactaatattaacacagctagtgctgctgcctgtgcagtactccccttatcatctagttgtacaattgatattgcagctacttttgaacttgcagtatatataaaaactagtgctgatattgtcaccatagagtttagaaaaaagtacataaagttctctaaaactgctggcaaacaaagtggtatagttacgttcttaagaattgatgcgctgtttattcccattgatttagctaccatgtccaattctttatctactttcttaatagcagtagtagctgttataaatgctactgaaaagaaatgaactatattacatataaccattataagtaatgttccatataatccattaaacaaatttttaatgtatattgtatccataaaattaaactctaatttattaaaaaataatacataagctatacctaaaactaatcctggcaatgccataggcaatgtacttaaaaaatacccaaatgattttaaatatggagctttttctgttttttcatttaaatatgcaaataagaaaacaaagctcgtccctagaatagctgtcaatagtgacatttttattgaatttataaatggtttaattccatcaatactgtttttcatagaaaagtgttccagtgtaagtcttaaatcatatggccaaactgatattaatgaggataagattacagttaacattacagctattataccaaatgcaataattcctacaacccctcctaaaatactatctcttaacttattagttttaaccttatatggaattgactttgaagttatatatgagttttgatttttttcaatttttttagttactataaacgatattattgcaggtattaaaagtaatattgatacagttgctcccattggcatattctgttgccctataatttgcttatatacatctattgataatacattaaactctcctcctatcacctttggagctccaaaatctgtaaaacataatgtaaatgatacgaatgcagaacttattaaagagtattttatacttgggattgttatgcttataaattctcttatcttgcttatccccatagtattactagcttcatatagtctataatcggttgaacttagagatatataaagtatttgaaaggattgaggaaatacatatataatttgtgccaatattattcccactgctccatatattggaacatgcactccaagtaaattagttaccaaaccttgatttccaaataaatatactagacctattgcatgcatcattgttggagcaaacataggaaacatagctaatgatttaaaaaaacctttaaatttaatctttgttctagttaatgcatatgcatatactaatgcaagtgttagtgatattacagttgatataactgatacaaatactgtattttttagagaatttaatagagattcagaagccaagtattcttgaaagttttgtaatcctacaaagactccatctttatctaaaaaagcctgtacaaatagatatattataggtgctaataaaaatattactaaagacataactaatactgtaagcatacatttttttatatctaaattcatttttgatttaagacttatacttttagaacttatagcattattattcatacacttatgctcctttaacttttggatactttaaatagtatttttcgtctatacttatttttacaaggtcaccttctactaaatttaaattaacccactcttttatagaaacatcacttattatgaaattttcatttaatttatcttttatttcaactctcaataaattccctctaaactctatatttgatattataccttggtagttttcttttgtcgatttctctatttgaacatattctggtcttacagttaatatagaatctccattatcaaaacagtttgtatctcctataaattgagctgtaaataggttttgaggattttggtatatttcttctggagtccctatttgcattatatctcctccatttagaatagctattttatctgccatagttatagcttcttcttggtcatgtgttaccattattgtcgttatattaagttctttttgtaatcttttaatgtccattctaagcttgtgtctaacctttgcatctaatgcggacattggttcatctaaaagtaaaaactttggttcaagagctaatgctcttgctattgcaatcctctgttgttgcccacctgataatgctttaggatatttatgagcttcattagtcaatccaactgtttcaagtacttccttaactttattatctattttttcttttgaaacttttctctcttttagtggaaaagctatattgttataagcagtcatattcggaaataatgcatatgattgaaatactataccaaaacctctctttgatggctctaaatttgtaatatctttatcctggagaattatagttccactatttacatcttcaagacctgctattattctaagtaatgtagttttaccacatccactaggtccgagtaaacatagaaattccccttcttcaatatccaaactaatattatttaaaacccttttttggtcataacttttaaacacattatttatttttaagtaactcatatcttatctctccttatatagttatttttttattttaaattttatatcctactttttcttctaaaattctttcatctaaattattaatttaaaccttacttactttcagattttgaaccgtattttgattcccaagttttaagtactgtacttctgtttttggcagcagagtttaaatcaacttcttttataagctgttcaaatggttgtttagaataaccttttggaactggattatatgtctttatggaagtaactgctacttcatgtgcatatctatccatagctgaatcacttattgcccaatctaaaaatagctttgcttctttttttatattatcttttttaactaaggcatttgcttctaagtcccaacctgaaccttcctttggaaatacaacctctataggttctccactagataattgttgtgtagctctatatccaagtgtaatacctattggatactctccagagccagctaacttcgcaggttttgaacctgagtgtgtatatgtagctatatttttatgtaatttatccatgtaattgtaagcatctttttcacccatcatttgaataagccctgatactgtaagataccccgttccagatgatgctggatttggcattgttataagtcctttatattctggttttattaaatcttcataactttttggaatatctatacctagtttcttaagttccttataattaactactattgctgtctctgggacactcattcctacccaagatacatcatcttcagtatctttaaattttttatcaactttatcataatttttaggcttatatgcttcaagtgcaccatctttttttagctctatcatgttcattgctgataatccccatataatatctgcttgtggattatctttttctgctaatagttttgaagctattacaccatgagaatccataactatctctacatctatattgggatactcttctctaaaaccttccatataataagctatctgctcttcctctagtgctgcatatattgtaagtttattatttccttttccttgagtagtttgtggtgttgttgatatgcaacttgtcataaatgtaatcactacaatgcacagacaagtaaatataaattctttcatatcttccccctttgtgttttttcctttttttatttgttttttattgtttttgcttatgtttatataatacacctaatttgttaatataaagttaagtgtaaattaacagttcgttaatttttagaaatttttgttaaatatattatttttagttaaatacagtctgtttttaaacaatatattaatttttatagtatctacattttaatttaaacataaaaaataagtctaacctctataaagtagaatgttagacttatttttataagtatttaattatacaaccaaatcattttttttcttttcttcaagtgcttttttaagcaccatatccttaaccttcataagtctagtagtacttgctctctcattttcttcaagcttcatagctatatacttaatagtctcaatgtaatttggtatcattacattttcaagagcattaacacgtctacgtgtcttttctatctcttgtgcaagaagctgtgcacttttttcactttctgcaagtcttaaaagtggttgcatagcatctgagaaagcttccatagcagaatctaattcacctgatgtaaaagcaagaccataaggataaatatcactttgattgttttcagttttaaagtcaaacacaggaacatcaacactcattatatttctcgtagaaacatctactgaaactgattgctttggcatcataagtgctgaacccagatactcctgactcataactgctcttgcgattataaagtttttataagcagtatcaagagcattttctgcttcttcacgcaatcgcttattttctcttacaatctcaagaaattgtttcataagttcatcaagtttatctttaagaagcttatgacctcttgtagcagttttaaggagtttcttaagtctagtcatttccatacgtgttggatttatatttaatctagccacagatatcactccttaggcatatatttttcaaaatattcatcacggatacgtttaagttcactttttggtaacatactaagaagcttccatccgatttctaatgtctgctcaatagttctatcagttctaaatccttgtgaaacatattctttctcaaattcatctgcaaacttagcatacattaaatcaatctcagaaagtgcagattcaccaagtatagccataagttcttttgcatccttacctcttgaataagctgcaaaaagctggttcattgtatctgcatggtcttcacgagtcttacctttaccaatacctttatcttttagacgagaaagtgatggtaaaacatctataggaggctgtatatcttttttataaagttcacggctaagtataatttgcccttctgtaatgtatcctgtaaggtcaggaattggatgtgtcttatcatcctcaggcattgtaagtattggaatcatagttatagacccttcatgccctttcatttttcctgctctttcatacatagtagcaaggtcagtataaagatatcctggatatccacgacgtcctggaacttcttttttagctgctgaaacttcacgcaatgcctctgcatagtttgtaatatccgttattataacaagtacatgcatatcttgctcaaaagcaaggtattctgctgctgtaagtgccattctaggtgtagatacacgctctacagctgggtcatttgcaaggtttacaaacactacagaacggtcgattgcaccagttgctttaaaatcgcttataaaaaattcagcatcttcaaaagttataccaactgcagcaaatacaacggcgaacttagaatcagttccacgtacttttgcctgtcttgcaatctgaactgcaagattggcatgtggcaaaccagaccctgagaatataggaagtttttgccctctaaccaatgtattaagtccatctatagcagagactccagtttgtataaattcggccggataatcacgtgctgctggatttattggagctccatttatatcaagtcttttatctggtataatttctggacctccatcaataggtctacccattccactaaaaacacggcctaatatatctggtgaaactccaaagtcaagactctttcctaaaaaacgaactttactttcagcaaggtttatacctgttgagctttcgaaaagctgaacaagtgcagtatctccatttacctctagaactttgcaacggcgaatttctccatttgaaagttcaatttctccaagttcatcaaattttacaccttctacgccgtttattaacataagaggaccggctacctcttgtattgacttatattcctttatcatagttcttcagcccccctctttttaataaggtctgcaagctcgttgtctatttcatcttcaattgaatcataagctgcatctatatcgccttcttctacatacttagcacgaccaatcttttcaagaactgaaagcttgataatatcgtttatagtaacattttgcttgatagcatcttgtgctgacttatagaattttaatataagtcccatcattctatattgtttatgaagtgatgtataagtatcaacttcatggaaagagttttgatgaaggaagtcttctcttatagaacgagtaacctctagtatcaatctatctccatctgaaagtgaatcaaccccaaccaattgaactatttcttgaagttcagattcaacttgtaaaagtttcatagcttgagctctttgagctgagaaattatcatttacatttttatctgcccatacatcaactttttcctgatagagtgaataactagtcaaccagttaattgctgggaaatgacgtttatatgctaaagatgcatcaagaccccagaatacttttactatacgaagcgttgcttggctgacaggttctgatgtatcaccaccaggaggagaaactgcaccaattgctgtaagtgttccttctctttcatccatacctagacaatttacctttcctgctctctcatagaattgagcaagacgtgaacctaagtatgcaggataaccttcttcaccaggcatctcctctaaacgaccactcatctctctaagagcctcagcccatcttgatgtagagtctgccataagtgcaacactatatcccatatctctaaaatattcagctattgtaataccagtgtatatagaagcttcacgtgcagcaactggcatatctgatgtatttgctataagcacagttctttgcataagtgactcgcctgttcttgggtcttttaattcaggaaattcaagaagaacatctgtcatttcatttccacgctcgccacagcctatatatacaactatatctgcatctgcccatttagcaagctgatgctgtgtaacagtttttccacttccaaaaggtcccggtatagctgctaccccaccttttgtgattgggaaaaatgtatctataactctttgacctgtaacaagaagtgaatctggtgttttcttttctctatatggtctttcttttctaactggccatttttgcatcatagttacaggtatatcattacctttttcatctgtaataacacaaactgtatcttcaacagtaaattcaccagaatatatttcttttatagtacccttaactccataaggaaccataattttacattctactactgctgtttcttgaacgccaccaattatatctcctgctacaaccttatcaccaacagattttttaggtttaaattcccacttagttgttctatcaagtgaagatacttcaacacctttagttatattagtacctgaaatatcatacattttttcaagtggacgttgaataccatcataaatagttgaaataagacctggtccaagttcaacactcataggcattccaagagaaactacttcttcccctggtcctagaccggaagtttcctcataaacctgtatagaagctttatctccatgcatttctataatctcgcctataagatgtttatctgaaactcttacgacgtcaaacatattcgcatctctcatgccctccgctacaacaagcggtcctgacacctttacaattgtgcctgttttcatattctctcacctgcaatcatatactttatcaaaatttaaatattccctcctatattttattagcacatatctttagcaccaataaaatttgagattgtcttttattcaactttcatctattctttaaataatatatctgcacctatagcacgtttactagattctcttacttcattcatacctaatcccatacttcctccaatacctggaataactataatggcaggaagttggtaatctttgtattttgctattgattcttttgcaagcaatgatgcctgttctgtaatataaattatcgcatattcatcttcaaccaacttatgtatactttttttaatttcgtcactatcataggctgggaagatatctattccaagagctaaaaatcccatgatgctatctttatctccaactactcctaccttatacataagcatcccttagcctttcttttatagtatctgcgtctatattattaagcttactagtcaaaataattctaattgtttttatctctgattctttagcatataaatatgcaattagtggttctaatgtaagaggcttaaattttgctcctctaacatattccataagatagtcatcacaaagtttttcaaagacagtaaaaccactatccatgccatttttacagacatcagagtaagaagtagatttaaaacatgatgctggagtatctgaggaaaaagcttctaagaatttttccttatcaagtgagccacctgaaacaaacacattcataaacatatcaaaatctttcttcatatttttgactcttataaaactctttagatttgttaaatcgcaaactttcataacataatctattacaaatttgttttggctttctttagcagtttctttcatactggtaaaggttgctttatctagaacaatatcaaccatctggccattttgtgtcttattataaacatcaaatgcctctaatatagctgatgacattatcttaggtaaatcactaaaactacgatttgctaaagattctctaagcttaataagaggaattgtacctccatcaattaaatatttctcaccatctacaccagaaatttcttctttaatcagcacttttaaattgtgatagtcatttttataaagaaatacatcaacaaatttttcttcaggagctagacttttaagaatttcatatgtctttgataattcttgagtcaaaatattctcaaaattatgtatattattatttgatgtatcagcataacctgcctcagctataattcttaaagagtcttcagggcttttggcttctgccatttgaataaacatttgtctgttaagaagctgtttttcaagcactcttattcgtgcaacggcatagggataagttttttcttctgccattttttaacccctccttaattaaacaaaatttctgctgcaatttgttcaatatattcatgctctactgcaattatggcttcaaatgaataattgtactcaatgtcaccttttttaactatgaaacctccagtaatatctctagtttcatcagacactttaatgcctttttttgatagcacatcttttaatgtttttttatcttttttagataatactatctctgaatcatctgtacaatttgatttttcaatcatgtttagtataatctcttcatattcattatctttaagatttaaaagtttgtttttagcttctaaaattacctcttctaaaatctcttgtttttttgataatatttgctttttagcctccatataagctcctgatatttccttagaagccgctttttctgcttctgcctctgcaagctttgtataggaagccatttccttttcagctttttcattagctgaatttacttttaaatctgcttcacttttagctttatccaatatttcttgtgcttcttgtttggcatcagctataattctgtcaatcattttttgttcattacccataggagtgcttcctccttttcattttttttacttatgaattataatttataattaaccaattgcaattccattgtaagctaagaaagaaacaagtagtcctaaaagagcatatgtttcaactattgctgcaaatgttatagctttaccaagttcttcaggtctttttgcaactattccaactcctgctgctgctgctttaccttgtgctatacctgatactaaaccaactaaaccaattggaagtcctgccataagaagttgtaaaccttgagctgatgttggtattgcatctccaccaataatccctgcttttgataaaataaggaaagctatgataaatccatacagaccttgtgtaccaggaagaagttgtaaaactagaagttgaccgaatttactagggtcttctgttacaacacctgctgcggcttgacctgctattgaagtacctttagcagaacccatacctgcaaataatgctgctatagcagctcctgatattgccaaaaattgaccatttcctaacgcgtttaaaaattccatatttacatctcctttttattaatgcttgtatattttgttttatacttaaacggaacaaaaggaactcctccgccttcataaaacttattgaaaaattctacatactgtaacctacttgtatgaacatatgcacctagtgcatttataagaaggtttattgtgtgtcctacaacaccgattacaactgcaagtatcggaccagctatagcccctaaaaggttgataacttgtgctataactcctgttgttaaacaaagcgccataattcttgtataagataatatatcagcaaaataacttgttatgccatagagacttgaaaatcctttaaaaagcttaacaggaatacctttaaagcttcttccttgagtaagtacaagacctatagcacctataattgctaaatattttcctacttctgaaaatacacctatgtcccctgcaacaaaaggtattataagtagacatacacctgttatacacaaataccaaaaacctatgtcaaagattgcatctattacctttccacttcttattaatgtatatgcttttattcccaaacctacatatatatggataataccgaacagtaacgacattcccataagtgtcataacatcctctaaaggattaattaatgcttttataggaattaaatcccccaaaatacccccgaatataagaccccatacagtagttgaaactccacagataccaataagtttaattaaatttccttcacctttttgtatctttaatttatatacaacaaatccacagactactgcaattattaacccatatgcggcgtcacttagcatcattccaaagaatacaacaaagaagaaagttaaaattgtatttgggtcaatatcttttgtacttggatagctgtacatgttagttacactttcaaaaggtgttactaatttattgttttcaagcagaattgggaagccttcttctttacttccttcttcagtctgaacacaacaatcaaacttttctgtaatttctttaattaattcatctgcccttttgcttggtaaccaaccattaagacagaatgttgtttttgttttgacaagtctctctataatctttttttggtctctttctatagtgtaaaaatcatataggttttcaagcatgtgtatactatctgcatgtcttttaatttcctctgttttgtccttagaaacgttttcctgcctaattatcatttcattgtatttcttgatagcttgtaacggtgtaccttcttcatttggtaatgaaaccactgaaaaattaaattcttttaaaacttctaaaacatcatcaaaagtttcttttaaagtaattaaataaacatagttcattaacttgtcagaattgacaatcccaataacactttctggtatttcatcttctaattttactcttaaagcatcaatatttgcgcttatgggcacagttccaagtatagtttttgtatacttagtttccatattttcaagaggaatatcaaagttcacccatggttctaacatacttttattgttgttaagtaagtttatgttagaccttattgtacctatctccttgtgcaaattgtttaactccagagcttcagcataaacttgcccttctttttcactatcaattttgttaaactctctttttggtgcaagtagggattttttttgtttcactagtgaagaaacaatattaattgcttggtttacatgagacattttctgctctagcattataacttcagattcttcactatcttttacaagataattttttaattcctcctcctcagtaagaaaggcactatcatcaatctgaacaaacccacggttcataagtagctttaaaatctggcttttttgagcttctaagccaacaatagatattttgttcatattaactattgccatattatctcactacctttccaataaccgcttcaatagccttactttttctttcttcagcagttttttcaattttcagacattcacttttagcattagctaagattttatcaacctctgctctactgtcggtgactgccttctcaataagagtttcttccataagctttgcttgttttcttacatcagcaaatatgctttcacatttgtttacagcatcagctctgatagactctgcatcagtaacagcttttactttgatactgtctgctgtctgctctgcctcaacaatgctttttattatttcaaaagccatccaaatcacctctcttacctttttactatgtatataaccaattagatttttttattctaattagattactacctcattgttaaagtataaacagcatttttatataataattaatatttttcaacgtttatttcttaataaaacatattttagaatagtacttgcctagatttacatccttttttgacttacttttagactatgacatgagtatggtttttaaataccattattttcaataattataatttaaagcgatatagtttgtcaatagcgttattttgttttaaaattaacgctatgtcgacattttaaatttttattttattttttttataattttaatttaatttattacatataaaagttttttatattctttttcaacctctaacccttgaagtttattgttttttttgaatttttagaaatatctcgcactattttatctaacttttataaatcatcaagctatatcgatttttgtcaccttattttcaatctaaattttttatatatagttagaaataaatcaatatttttaaagattgataaaacttacacttagttctaatagttttattttaaggcaatgtattaatcttaagtagataatatcattagttactctatatattcgacaacattataaaaaaatcctcgtaccaatcactccaatcttcaataggatatgctgctcctccatttacacttttcagtaggtttgatgtatattcttctcccatggaaaaaagttcccctactgttatatcataacctctagatgtaacaaccttacaaaatgaatccataacatcacgttgttctcttgtttttataagttcctttctaaattcatcatcattcttagcttcttctaaaattttagttaatttttcattcattatgtatttctccttttaagtagtctttctgtaaacttcaataagctttatataaaaaggaagccatcctaaataaactaagatgacttcgcttaactgttagcaacacatttactagtataaaataattggtgtacctggttctatattttcatatattttctttgccttagaaaaaggtgtatttacacatccatgtgaacctgaagacttatatatacctccaccaaaagaatttctccaagtagcatcatgaatgcctatgttcccattaaatggaagccaataacttacaggtgaactgtaaccttgaccagttaatgaaacatttctagccttataattaagaggatatatacctgatggtgtagcaaatcctctagctaaatcgcctgttacaacatctgttgatacaagcatttctccatttttaaagaaccacatatgttggccagaaagactaatctctacatatgtatttccaatatcatctttattacgagatacagctttttgtatgtaaataggttctcttgtaacatttttaccagcttttacaacatcaactaatgcttcagcttctttctttttatctatcaaccaaccataaattccacctgaaattgtaatatctttacctgtggcagttttaaatggtcttgagtcaccaaaagtactgtattttttacttaaacttcttgtatattctaccatagcatcattatcaaaagttatgtcataattcttttctgagtctacttttaaccatttattaatttcagaaccatctaaagtttccttacggtcactaaaatcatatgtaacgactacaccaacatacttatctaatgtcttaatagcttgtttcaacttttctgaatcctttgtgttgtttggtgcttcataaactttactttcatccagagaaatagaagtattcccagaattaattgagttttgtactaacttataaaaatcatcttttttcactttgtttccaagtacctctggtactataacataagcgtttttagtgctatcatacttaggataagcactcttaggttctacaacatttttactatcaaaacaagataaagcattaaaccttttttctagtaaatctttattatatgaaagagttatcatattattatactctttagatttaaatattccaccaatccatccaatagcgctttgactatcttttatcttttgaactttatcatctggtgtaaattttaaatcaatatcttttgcttttatttgttctttcttattgtttctttcctctaagtttaaagtataggaattagtactagatgttaacaaatcatttacttgctcaactgtttttcctgaagcctttacgccattaatagtcgttccaaagtaaaaatgatttctaaaaaagattgccattcctatataagctacaaacaaaacacctacaactatagctatcttaaattttagatttttttgtccactttcttgttttacctcttttccatcaatcataattaaatccttccttacattgtaattacctatgtactttattggtttttaaacaaaaccatgtatgccttattttatatacccaaattactgtatcattgtttatatttttaaatatatagttatttccataaaaccattttatcttttagacaaaatgactattataaatcacccctttcaaaatcccttaaatacaatctctgctatattaatatattaccatacttttaataatcgtgggttatctatctgtttttgtaacactaaactactcttttaaaaaagaaactaattttatgttagtttctttatcttaacttatttttatattgaattttagcttaacataacgttgttatatagattctatttaattattttagtttctatatcttttccatcagcatattctttaagtaactccttagcatatccaaaatattcttcaatatcagattcttgactaaaagaaaatatacaaattaatatttcatttgcatcttctgttatcattgctctttcagaatcactagttggactcccaaatttacccactgaatcagacaatataggaagattttctatatttattaattctttcccaatacccttatactgttctccttcatctcctacagtaaaacatactggtgaatgtaatttgcttacattatatgtacctactggatataatgattttattgatattaaattgtttatttctactatattatttattgtataaagacccttcccttgaataattcttctaaccaatgcttctgaagatgttctatatctacttggattttttccaagctctttataagcatttcttgcatctttaattttatctagtttcgtaatgtcttcaacttttagactttgatttatagtatcacaaaactcatttatttcattaattaatttttctgagcttttatttactgctacttttgcttgaatgcaacccaacttagcattaggccatctttccttaagtttgtcatcaatactcacatctatcatacttaaacaactcctatacactaaatttttattaaagtttttatcatctatacattatagtactattcttttgttaataacatgtttattagcaaaataaatttatttttaatataatttttataaaatacaattattttttgctttatattaaacaatacattgataaaataaaaaaacactaattatttagcagtgatttattaaaatcaaacattcataatagtgctttatataaaaattaaattttgttttaaagtaaatctaaaaaattcttagctggcattggtcgtgcaaaataaaatccttgaactaaatcacatccaaattgtttcattaactcagcttgttctttactctcaacaccttctataattacaactaaatctagtgattttgctagagacactattgattttgctatattgcgacttctctcatcatgttcaataccattaagaaaagacttatctagtttcaatatatcaattggcatatctcttaaacaactaatagaagaatatcctgtaccaaagtcatccatagaaatagaaaatccatacttcctcaactcatttaaaacattctttaaaatatttaactcattaatagccacagtttctgttatctctatttcaattaaatctgaacttagattatacatttgtattgttttattgataaattttacaatatctggttgatacaactcaactctagataaatttattgaaactggaactatctttttaccttgctttttccattcagataaatcattgcaaaccctttcaaatacaaatctcccaatttttaaaatcaacttacttttctctgctattggaataaatactgcgggacttataaaaccatgttctggatgattccatcttattagtgcttcactccctatcatttctccagttacaagtgaaaacttaggttgataatacacttcaaattgattttttaccaatgctatttttatatcatctaaaatcattgattcttcactaagcttattcctaacatcttcattataaatagcataatttatatttttacctttagcaacagacctagccatatttgctttatttacagccttttggatatctacttcaccttcttcaacaaaataaatacccacacacagagaaatttcaaatactatactcaaattactttcaatattatttcgtatactatcaatttttcttatacgtttattttttccatttttataatcacagaaaattgcaaaataatcacttgaaagtcgtgcatatacttcaccttctgttaattcttcttttaaagcttttgctatcgtaattaataaattgtcaccaaattcatatccaaaagtatcattaatcatcttaaagttattaatatcaaaatatactataatataatttaaagatggtttatctaaaagatacttactacactctctataaaatttattttgatttcctatatgggtaactttatcttcataagccaaacttaatatttctttttcattggatttttttatataaattatataaaaaataattgcaataaatattaatataataaataacactgcatatatagctctgttgattatttgttctgaattactaaatacaacagtttctggaattgaaaaaatcaaattccaatcttttatataattattttcactattcccattatccatagtagcatatcctaaatatcttctttcttccaacatatttaatacagttgcacctgttttattttcttgcaattctttttttaatctatttatttctcgaatatcattatcctgttttaacaatttataaatattttttgataggctatcctcttgcggatgaaggataattgtaccatcatttcttacaacataagatatactattattttcataaaaagatacattaataagtttcatcagagtattgatattgtaagtacaatataaaactccaactactttatcattatttaataatggtactgaaatagtaatcttctttatagacttatttacttcatcaacatatggacttgaaacatacttcttacctttaattgagtttttgaaaaattctctatctttcactgaaaacttatcacctttggtattttcagcattaccatttatatcaactattgccatagtgtaaaatttttgattttccatttcatctaaaagatttttcattttttcctcattaggtatatcttgatttaaagcataatagttagaaaaaatatttaaaacatctaaatctttttcaatttgtctttgtgctagttgagagccttgtactgcaacttcttttatatgtatttttgcctctgacataagaagatgttttgtatcttctatatagatataccccattgtcaaaaataatgatgttaaaaaaagaattgtaattaatgtaaaacttttatttctccctgtcattcgactcctcccctaattagtcaatacttcatatagataatatatcctttttataccgattcatcatttatattgtatataactattcttaaatgttacacataaaatcaacctaataaccataaaaacattcttttattatcataataacactatttagttgaattttaaattaaagaataaaaactatcaatttttctaaacaaaaaaactcttatacaataaaactttgttttatgtataagagtttttattttatctattttatagtaaatttatcttccataatatgaatttaaatacatatcttttatttcattcataagtggatatcttggatttgctcctgtacattggtcatcaaatgcttgaatcaccatttcatctattgaatccataaacttaggttcttcaactccaaactcttttatagatttaggaataccaactttaagttttaaatcttcaatagctaccaataaactttggaatttctcttcatcagaatttccctttaatcctaaaaatgaagctatttcagcatatctttttaatgcttctggatatttatattgagagaatgctcccattttctttggtgcatctgaagaattaaatttcataacttctgttatcaaaagagcatttgcaacaccatgtggtacatggtggaaagcacctaatttatgagccatagagtgacaaacacccaaaaatgcatttgcaaaagccatacctgccattgtagaagcatttgccattttttctctagcttctgggtcttttgcaccattatcatatgcacgtggaagatattcaaatatactcttaatggcttgtaaagctaatccatttgtataatcagttgcaagcatagatacatatgcttctaatgcatgagttaatgcatctataccagaagcagatgttaagctttttggcatattcatcatcatatcagaatcaactatagccatatttggcatcagttcataatctgctaatggatattttacccctgtatcttggtcagttataacagcaaatggtgttacttctgaaccagtacctgctgatgttggtatagctacaaaattagctttttcacccattttagggaatgtatataccctttttcttatatccataaatctcatagctaggtcttggaaatctacatctggatgctcatacaatgtccacattatctttcctgcatccattgcacttcctccacctatagatattattacatctggattaaattctctcatagctttagcgcctatcttagcacattccaaagttgggtctggttctacttcaaagaatgtagtgtgcttaatattcatttcatctaataaatcagtaactgctttagtatatccattattgtaaaggaatgtatctgttacaataaaagctctcttcttattcattacatctttaagttcttttaatgctacccctaaacaaccttttttgaaataaacttttcctggtgatctaaaccaaagcatattttctctcctctcagctactgttttaatattaagtaaatgcttaactcctacattttcagatactgaatttccaccccaagacccacatcctaaagtaagagaaggagctagtttaaaattatataagtcccctataccaccttgagaagaaggagtattaattaaaattctacaagttttcatggctgaagtaaacttatcaagtttttctctttgatttacatcatcaatatataatgaagatgtatgcccaaatccaccatcttctactaatttttctgcttttctaactgcattatcaaaatcactggccttgtacattgcaagtactggtgaaagtttctcatgagcaaaagcttcttctatttcaactgattctacttcacctattaaaaccttagtatctactgggacttcaaagcctgcaagttttgctatagtacaagctgtttgcccaactattttagaatttaatcctccatttactaaaattatatttcttattttttctgtttcatctttatctaataaataagcaccacgctctttaaattcttttttgacttcattgtatatattttctaatactataaccgattgttcagaagcacatatcataccattgtcaaaagtcttagatacaagaattgagtttacagcagtttttatatctgcactctcatcaattattgctggagtattacctgcaccaactccaatagctggttttccagatgaatatgctgatttaaccattccaggacctcctgtagcaagggtcaaatccacttctttcataacagttgtagttaattctaaagatggctcatctatccatcctattatgccttcaggagctccagctaaaacagcagcctcaagaacaacttttgcagcctctatagtagaattttttgctcttggatgcggagagaaaattattccatttctagtttttaaagctaaaagtgctttaaagatagcagtagaagttggattagttgtaggtacaactgctgcaataacacctattggctcagcaattttagtcataccaaatgcttcgtctttctctataacaccacaagttttagtttctttatatgcattatatatatactctgaggcataatgattctttataaccttatcttcagcaattcccataccagtttccttttgtgccattatagctagaggaactctttgcttattagctgccaaagatgctgctaaaaaaattttatctacctgctcttgagtatatgtagcaaatattttttgagcttctctgatttttgctagttttttaactaagctttcaacgttatttacagtatctaaaccaactgacataacttcattttcttttttattttctattattacttgttctttatgagccattttaacaacctcctgagatagttttttatttattatgttaatttattaacattatagcatttactttttctattttcaagttatttttttaacattttattttttatctaatataacatcatttctactaataatatctagctttacaaatacttaatttaactagatatcactttattttttacgcaaatcactaataaaatcatctaaaaacttaaggataacgttatttttttaacgtttatatttttgtattttttgcaaataaaactttataaaaagaatttttaatatgatattctatcaagtttaaaaataaaaatacttgaaaatgaaaataataacttgattaacaagttaaagtaaatatagttaaatgtacaaacatttacaacatatagtataattaaaaaaatatatattcatgatttttatatactatgaaataaaatatatttaatattatatagataaatttgaagtttataagaaggaggataagcatgaaaaaattaaaaacaattagcattttttctttgattataagtgtaattttaacgattggaggtattggaatagtaacttattatgtagataatttgtttattagaggactatcagtatttgttttaattatgtcctcttcttttgtatcaacaacagttagattgatatttgaagagtcaaaacgatataaattctaatttaaaaattggattaagtaaataattttaatataccaaaaattacggagattagctcaaaatagactttttagttcatgatgcatttttttgtatgaaattaaatatattttcatcatttcaacaatgaaaaagaggcttctctctattttgagacagcctctttgctagtattgtatctaatacataatattataagaaccaattctattgatgtggactttttataacaggctgtagctgtttgttctctagagcaagttctatagttggaattattagctcagtatgtgcaatcatagaattaggctttgctttgcaattatcttgaccaaaaggtacaaaatatatatttttagaattaaggagaataccaatatttttgaaattaaagcttagagcatcattcgttgatattgatattactagtggtttatcattacgaagatgaccttttgctgccattaatactggtgaatctgtaataccatttgctaattttgcagcagtatttccagtacaaggagctattattataatatcagcaatccctttaggtccaaatggttctgcctcttcaatcgtaactataggtttatttcctgtaagttcatatgcttttttcataaactcttcagaatttccaaatctacaatcgatattttgtgatacatctgaaaatatagtgtgtacattagctccttctttaaccaaattctctaactctataaatattttatcataagtacaaaacgaaccagtaaatcctactccaattgtaagtccttcaagtctcatttctaatcccttctttcatttataatattttctatagcgttaacaagaatctcaccagatgtctttggtgaatatttaccaggaagcccaaggcaaagagtcgcattaatccctacttctttaacaacagaataatctactcctccaggagaagaagctatatctataatagttacttcttgtgatactttttctaatctttctttcgttaaaatacactctggtatggtgttaaaaatataatcaaattgtaaaagtttttcatcaagttgacttaaagaaatactggaatatccaaatgcattagccgtacttcttgcatcattatttcttgcaccaacgcatacatttgcatccaaagcgtataatttttttgcaagtatttgtgcacatcttccataacctaatactaaacagttactttgatgtatattgattatacttcttttaatagcttctgctatagccccttcagctgtagcaactgcatttaaaatagcaacatcattcattttcataaaatcataaatctgaatagagtgttgctcgcaaaatttacaaactttagttggtatgttacctccaaataatatttgattaggagataaattaattagcaagttatcaatagtagcatcaagacaatcatccgtattttcaatattaacttgattctttgtaaatggaattggacataaaataatggaacttttggatagtgcttcagctagtgaagttgattttccaacgattccatttataatttcatttgatatcccataagtgactacagaataccctttattaattagtttttttaccatgtacacttgtcgcaggtctcccccaataacagttatatcgtattgatttgacatattgtaagcctcctttactatatacaatatgtttttatcaatacattggttcactaaaattactaaatattatacttataacatttttaataatgctaatctatctatcttttcagaagaggtatatggaaatgaatttaaaaagataattttctttgggatttcatttttcattagattatctttcattttaatcaacaaatctttcttcgtaattttgtctatagttattacaaataatacaatttgatttcctcttatagtgtctgagtacggcaatacaattgcatcttcaatttgaggaatttttttaacttcattttcaatcttagcagaactaactttaaatcctccaatatttacaatgtcatcacttcttccttcaaatattaagtatccatcattatcataatatccaatatcattgacagaataaggtttggttgcattatatactgcatattctgtattcacaaaaatttttcctcctctaatatatatatctattcctggaaatggtctgcctacacttagaggtttttcaattagttcatcatagcataaatatgtaatataatttaattcacttgccccatagtataaaataatttcagactttggcatatatttttttagatttcttgcagtatattcaaataataattgagaccctgtaaaaatacttactactttgagtactggttcttttaagtgtttaaccaaaagttgaagttttgtaggtataaggtatatgttagttacattatattgttttattgtccttatccatgatttacaattaagacctgaacttattacaatactacctccttcatataatactgacattatagaatttagattccctgtaaaactaagtgttccattaacaaacaagattgattccccagagatattaaaaataccattttgtataggaaaaaatccagcccaactctcatatgttctatataatacctttggaacacttgtagaacctgaagataaagctcccatacaaatacttttatctaaataatttataaggttcttatattgatacatatatagattaaatttaggattaaaaatagaaaaattaactttttttgctacttcattattgttatcatcatataaatcaataacgtccatagattcatcagatataatgattgaaatattattttttaataaaatatcatctaatacttttttagaaagattataatgacaaataataggaatattttttgaataattaatagcaaaaaaactaatcaactgaaacattatatttttagaatatattaaaattgagatattttcacctaaagaaatttgttttcctagttgctcactataacttaatatattttcataagtatatttttctccatctataattaaaaaatttttatttttatgcctctctttttttattcttaaaagttcataatagttcataatctacaccctttcaagcagtaaagctgaacctagaccaccagctgcagctatagagcaaattccatatctacccttagttttttctaatgcttttaaaagatgtaatgtaataattgcacctgaagcaccatatggatgtccatacgctaaagctccaccaaatatattatatctctctattaactctggatactttctttgaaacaacacatctataactgcaaatgcttcattaaattcaacagcagatacatctaaataattaaggctttctatctctaaaagtttatccattgcttgtatcgctgatgttggacttaaggttgcatctgttcctattgtgcatgtattaataatttttgttttaggcttcttttttacatgttctaaatacttcttagaacatattataataaatgaagctccatcattaataagacatgaatttgctgcatttgtaatagtttcttttcctaaaattggtggcatcctatctaataacctttgactcatcttatcacgtataccttcatcataggtactattatttataggagatataatatcctcaagtattttttcttctcttgcttcttttgctcttttatgactttcctttacccaaaaatccaagtctgctctctcaatttgatataactctgctactctttccgccccttcgagcatactattttgactattatcatcaggagaaaattgagcaactgtataatttggattatttgtattatatcgcttatcattcttatgatatgtgcgcattggttgtagagaactactttcaaaaccacctgcaataattaaattacactgaccagatttaacctttgaaaaagctatgtctatactcatcatagcagaagcacactgcatatccacagtaaaagcaggtacttcatttgacactcctgctgttaaagtcattaatctggctatattccctcctgtcccaactgcatttccacatataatctcatcaattttgtcaatttcatactttttaattaaatcttttaaaacacttgctcctagtaattcaggttgaacaaattgaaaaattccattttttagacctatatgacttctcaatcctcctaatataaaaacttccttcatacattacacccttccttatattatagatttatcatagatttcttctgagtacattgttcagtttagtgcctaaaaaagatgcaataaccgactttattgtatctccaattaaaaatggtactactgctgcaaaaagtgctgcttctactgtcatttgattaaaatagcacataaatactgttcccataaaatatataataggcattccaacaaaaattgttattagtatatatctcttaatatcattatttcgtccttttaataaactaataattagtgctgcaaacaaaaacccaaaataaaaaccacctgttgggcttaacaactttccaataccagatgtacctccaccaaatactggaatcccaattaaacctatcattatatatacaccaactgtactaaatgcttgtcttggtgttaaaatcaaagctatcaaatttatcattattgtttgtgctgttactcctgctggagtaaatggcaatggtatatatatgtaagatgatatacacaataatgctacacatattgacattttagttaaatcttgaatatttactttagtatttttcatttttataattcccttcatatgtcttatttcatttagtttatatgtacatatacaaagcctctattaaagctttgttttagtataaaataaagacgtttttttgtcaaccattacaagtatttaggtttacgtttaatttataagtaaactttatactgttactttatattttaatagtcatttataaaactttgcttaaaaacagctctatttagactatacttgtaaattataatatgatatatttttatataagattttattttatataaaaaatagtaacaaatagtttatacacaagatatttaaaaggaagtgatgatatgaaagttaatgaaaataatataaataatatagatgaagagttagatgaacttagtaggaaagtttacttagagtcaccagatttttggataagtatttctgacaaaataatagataaagtatttgatgaaatgttattattttttgcagttaaatataactatttcaatatagtatgctttgctattgaaaacaattatctggatttaaacatgccttcaaaaaacaaaaaatacactaatataatggagcatttgttagatacatcaaaacagaatgaagataaaaaaatttataattatcttctaagcttaaataaaggtaataacctagatgaaagaccaattttagatgaattaaactgtaatattagtagtgatacttttgaaaaaaaagatatatatcttccaaagtacttatgtccaagttgtaattctaatatatttgatacaggttataaagtatcaaatgacataacatataaattttcttctaaagaagctgaacctattgaaatgtctagtgaagtttcttctatcagatgttgtaattgtgatgaattattagaagatattacacttaataaactatataacctatgtaaaattcaaaactgtaataattgtggttctaatttaactaaggtaggaattattgcaaagaaaaaaatgaactttgatgagaatactgaaaaatttaaagatgtctcaacatcttactgttgtggaaattgtgactctgaaataaacttatctcaaagagaacattttaagatttaaatatttataggctaaagtaataagattacattattagatactgtataagttttttaaatctgtaaaaataaatacacttataagaattaaaattgctatgaaactagttcttgctgaactaatttcatggcaattttctataatctaataattattaaattttaacaaacctttattagcattccataattattcaaaattctttcaaataccctatagtttataggtgaaagtatctttaatattatatcaaacttattatctttaaatagtaaatttgttaaatctgaaatacaccatacaattttattttcctcttttgtagctatatcaattctgattaacttacatctataataaatatctttatcttcatatagtctattttaaaaattactcttataaaaatcaaatagaaaataaattaattattcttttaatagaatgtaatcatattatttactatattccattatgtactctttaaatcctgaatcttcatttacttgttcttttactatattaaaaccttttttattataaaacacaactgcttttttattatctttatatactgctaaacttagacttttatattttttagttgcataatctaaaagtttacctccgatacctagattttggtatttgggttctataaataaagctcctataaagcttttatctattatgcttataaatccttttatttcatctccatcatcatatacaaatgtatctgatataggtatatattcgtttttaacagtattgtagttattttgccagtattctttacttataaagtcatgtgctttgattgtacttttttcccatatttccatgattttatttatgtctttattgtttaatttctttatcataaattttgtttcacctcatttttgtattgattttataatgtttataggtaagtgcattttatttagatatgatttagttaatataaggtggatgttttagtatatgctattgtttattctacaattttatatactgctttattaatataaaataagtttctaaatactcgttgatattgctaatattctacttatctaccacttagttgatataaaacctgacactgtgtcttgtgtgagtcttttctttatcctatttacataccacttagttaatataaaacgattaagcccagtaaaaagactcgaatctcttatcgcatttacataccacttagttaatataaaacgcaaaaaatgttgatattcccaaaattaatattgatgaatttacataccacttagttaatataaaacattatagaagtacatatattgctgaaaaacctcttgtatttacataccacttagttaatataaaacagttagtgatatcaatatgctaagcaatatttttacaatttacataccacttagttaatataaaactttatatttcgtcgcacggattcgtgcgaagggttggatttacataccacttagttaatataaaactaatttagttatatccatttgtttaacccaattagtatttacataccacttagttaatataaaacgtttcattttgcactatatcaagcttagtatacaatgatttacataccacttagttaatataaaacttttatatttaattttaaagattaaaggtataaacaaatttacataccacttagttaatataaaactactagaattattaaatgaaatgaacaataatattgtatttacataccacttagttaatataaaacgatttaaatgcaacacaaattataacatctaagaatatttacataccacttagttaatataaaacaagattgaaatttcaacactttcaccttgtatatctatttacataccacttagttaatataaaacaggttaaaaagcaatataaaagattgcatggaattactatttacataccacttagttaatataaaacaagtctcaataacaacagtcgaagcagaaaaatccggatttacataccacttagttaatataaaacgtaaaatgagaaataaaagtaaacaaaaaggtttagtatttacataccacttagttaatataaaacctgaaaccctcggatttagtaaccgattctatgtcgagtctatttacataccacttagttaatataaaacaatctaaaatatgttcgttaaaagggagtgtgtaattaatttacataccacttagttaatataaaacgtttcttatacaactcttaactccaagcccattttggaatttacataccacttagttaatataaaacgtataaaaaaagagttagaagcattagacaaatggaatttacataccacttagttaatataaaactataattgggatggtcaggtttctgataaggttaataaatttacataccacttagttaatataaaactgttttttagttttcgtgattcaaatggttctttgttatttacataccacttagttaatataaaacaactcatgtaacaagtattaagacttgcacctttaaatttacataccacttagttaatataaaacttcattaattcctttcatagcacttaagttaaccaaatttacataccacttagttaatataaaacctttagttgttgtcgcttttgcttctactatagttgcttatttacataccacttagttaatataaaaccccaaaataggtataattgaatacattgaaaatacttcaatcaagcaattataattcaataaaaacatcaaaatttgcagtgagcgagcagtagtgcaattgataacagttatcatacaccttcaatcccttatattccaactgttaacacctattttagcataaatatcgctcactgcaaacctatataaacatttcatcagaatacttatcaatcccataacatttctttttaattgaattaggattttttatctcataaacatagattgaatcctcgctattatcaataatattttctatttcagaaatacatttatgtaactttccatcagtaatattgccttcaaaaacagaattttgcgtccaagtcaaatattttctaagtatccttctaattctatttaacgaccttgcttcaacaatatcataagtaacaataacaaacatacttaccaccacacctttaaaactttgtacctttcatcatttataaaatgtttaattaatttataacactctaaccttataaacattctatatgaaacttttctatttagatttctatgttttatagttgtctgcatcttattttcaaattcttgcaaaaatttcttctttcctttttcacttaaataacaaattttgtcttgatattcaaaatcattcttattaattcttttattattaatcaggctaaaaattattgtgtcaactataattggcttaaaaatttctgcaatatctaaacttaaagaaaatctctttgttgatggttcatgtaaaaagcttattgtagggtcaagttgtgtcttatatatctcacttaaaacattcgtatacattatgctatttccaaaagacataagagtatttactgggtctttgggaggtcttttttctcttttataaaattcaaaatcatcttttaatatttgattaaatgatttatagtatgtttttcttattctgccttctttacccataagttctgatatttctttgacatcattcaaatcatttagttcatcctttatagtatcaattaaactttcatcaactttgtaatatctcatatttcttaaaatatggtatgatgcactttccacaaaggattttgctaagtataatctttcatttttatctaaatagcaggctgattgacatactaaactgaatcctgatacatttttcttccttggataatatgtacctgaataatatccatagtaattgtagaaatgaagcatcaccccatatttacttatgtaatttataagttttgtgtttaaatctacttctccatatatatgaatatcatcaacttgttctactggtaatatttttttctcaccttctaaattgtaatagtaaatcgtattttctttcctttttatatttccattacttataatataatagtctttatacattgttactcctccttcacaaaacaaaattcataataagcacattttgtacaataatgttttttctcaattttgggaggagataactgcatatttatttcatttatatttataagtgtgttttcaataattttttctttttcttctgtcaatatcaattcttcttgtttcttttccttaacataatttatagttccttttttctctatacccatactattctttaaatagtataagtaatagtataactgcatttcatctgcttctttcatctttgaacttatttttacttcttttacatactcgtcctttattatatctagcttcaagatatcatcaatcaacatttctttatttttcattcttttatatgaatcttcatgtactatctttccagacaatactctactactattttgttccatagttattcctttagaaaatagccatagttttcttttacatacataataataatttatttttacgccttgaacttttaatacttctaaatctattggcacaaaatcaccttctttagtaaattttagccacattgttaatataaaaatcaaataaattggtctatttcattacttataagcacacctttaccaaatatctgttttgtatgcttattttcgtgtatatcatatttatataaaagtatttttaaatcttcaagacctttcacctgtatgtcaattacattttgtttagctttatatattggtaaatttacagtttttttaattatctctcttcttgctttttttctcttagactttattttatttatcaattgtctatcatcattactatatgcatttataagctcttgtcccaactcttcataatctttgattaaagtttcttcaattttattatatatatcctctggaattactgtatatccttcaatatttctaagtatattttgtgcatctttagaacctaaactatatggcgttatagtatctaaaatatttaaagcactggtaaatctcttttcaaaagctgtaccttctagactttctttagagtatagtatcttaaccatttctaccttatatttttctttcatcttcacacattcttttccatttataaaagttttcagtagctcaagtcctttttctacaatatccttatcataaatactacctattcctgtagctttttctgtatatataaatatatttgggctattttcttcatactcacgacttctataacatctaccaaatcgttgaaatagactgtcaagtgttgaattttctgtatgaagctcatcaaaatcaatatcaagggatgcttccactaattgtgtagtaatccaaataccattactatcactatctgcaaattcttttatatatttttctaattttgctctatcttcttgtatatacatagaatgtaaaagatttaagttgacatctattccttttggtttaactatttcttctattaactcatatttttctacagcacttttaactgtatttactattacaagaacttttttattcattccactttgtattattttacctaagttttcatctattgaattttctacaatagacacacaatgtcttattttttctgtgttacatgtcaagtcagctaagttactattcattacacctcttttttttaattcatctatatatatggttggcatagtagctgtcattatcataaatctgccacctatcttatgtatcatttctataccttttaccaatacagctgctatttctggtgaatatgcttgtatctcatctattactacttttgaatatgctaatgttgagtacactttttcatagcctctatacaaaaaaggaaatttaaatatttggtctattgtggaaaatgtcagtttacaagataataactttgctaaatctacaatctcacttgaattttcctgattactttcttctaaataatctattgctgttgaatgtaacagacctaagaatgtatcatttgcttctcctactccaattatatttttagccctatcaaataatgcatttatacttactcttaatggtagtgtaaaaaatgctttatccttatctatccaaatcaaagcagtttctgtttttcccattcctgtagatgcaatcagtattatattcttatttctattagatttagcaaatgattgagcctctctcaaactaccaaactctttcattaaataattttctgtctgttctcctatatttataacattattgcattccacaacttcatgagcagaagcactatggtctagtctatgtagtattccttttaacataatatataaattatagtacttgtgatttttatctattcttttttctacactttgtagatatactttactcaatttttctgtttttattggatatctaactttaaattcacgctgtagttcataaactttatttattaaatcttcatctaatattttttgtattaaatttttaaaatctttatctataaagatatctctttcatgatgatatacaataacttgatttaatactgctctaagttctttattttttttcctgtctatataactataatcaataaatgcaggagaaagataattatggcctacattattttctaaatgagttactattttaggttcatttattttagtatccattctgctttttattaactcttgaaacggtgaaaatgcttttccaatatcatgaaattctataacaaagtcaagtaattgccaaaatatctcttcctctagaaaatctaagctatttatattttttccataactttctcttaatacattcatttgttttaaaagttcatcagtatgttctctaagtgtttccactggattagatttagcatataacatactctccctcctaatttatattattaaaatataataaatctccttcattatctaataatatatctccaattgatatagtatttccatcctcaacataataactatctaccttattccaaaccctttttttatcttccacagcattattatcatagtaattattgagtctgtaacttataccatctatatctgtatcttgtaaacttgtttttggtatatatataggcattcttatattacattctgataacttataattttcataatcatctaattgtatatcctcatctacttcaaatttattgacttctacaaatctaatatcattaattcttactaaatcttcttttctacctaatgataagtgctcgtcataatttaataaactatcatatatttcttccaataaatcaaaatccccacctatatgaattatcaaatttacattcaatagcatatgactattcattggcatagatgtaatactatcttttttataaaaatatgttgtctggtaattattaaatatactttcatatgttccctgtacacttatattaaatggtatatattctgtagcatttaatattttgtgaattaatccatttattgtagaatatggaggcagtggatatgtctctgtaatcttcatagcaaatggttttttatagcatgcagtttcttgaaataaatctaatttcaaaaccttcatattaattcaccccataatattcctttacttctttaactagttgtccaaaaaatttatctacacttaaaaaattatcttcaaacaatcccttaaattcttctttatttataaataccccatctaccattccaacataggtaaattcttttaaatcttttcctaaaaaagtaccttgaattacttcttctatagcttgcttatttattttaaatccatttttatctccttttaatttaattctacccaagaaaaatggatttgctatttcatatactcctcctactacaaatagaggagataaattttcttgtctacctctaatatttctattcaatacttttattatttctaaaaattctactactcttctacatttctctttattatcaagttctatatctccatccttacctattttagataaatctatagtcactgtatatgtataataacttaaatgttgctctatgttagcaagattaggatgttctcctattctatctgctaatcctttattatttaaaaagtccatgtcacttctatatggctcaagggaaattgcattacttaatcttacagtagcttctctagtcaaagaacctccttttttatctttctcatcttttttatttgttttcatatatccaaataaatccatttcttctgattctcttatacttatattgtctttaaattgaatagtacctttttctttatcgacaacctgtaaattccaattaaacaattctgctgctaatcgtactatgtcatatcttaaacactggcgagatgcaaatgtatatatatttccatcatctctacttaatttttttaattctgatatattacctatcccttccccatagtttaaactttgagcctgtgctattactgtaaatgttaaccctcttttcatcttatttttcctccttttcgtttggtagtttgtcttttccttcatattttccagaaattaatccagatataaaagcatgacctatagattcaaagtctaaatctttttcaatttctatatctaaaataaatgctggaatctgtttttcagctgacataaaaactcttataattgtatccataaaatcacttttatttccgactttaactgaatttaaaagtttatagcttactccatctattttatttttagaatttttattaacaaaatagtcatgtatatcacaacctaaataataaattattctcagcttttcatcattcttctccaaatttttactatccattttatataccccctttttgtagctatttattaatgctcttaattggactactctaaaacaatctattcctgatatatttgatttgttgttgctttccatatcatttttaactttatttcttaaaatgttattagttagatgcttcaagtccctatttttcaagagtaaatctagtacatttgatttaagcttgtaatcatagatactttgtatttttttatttgcatacttgtctgtaaaaaattttgctaaataagttggaatattaaaataatttattttacattttttagaatctatacttgctttaaattccacaaaaagtatattacgaagttgccattcactttttaatgtattttcttctactatactttttataagctgattaaaaggattttcatctttggaatctgaatattcacttttttgagcttttaaactattatttctttcaaaaagctcatttatagaagtatccatgttaacaaataaataaaactcattttcttcattaattaaataattctttcttgtataagtagcccctgctggagtacagaacaatattagcttacaaatatcacatattgatggtacatacgcctgattccaaaacatattcctagcattattggtgcttactccaagtggagcaaaattactttctgagtattcatctaatattcccttatataaaccacacatttcacatacttctaaactatccatatactcttttatatcttctatgcttttatttttctttataaagtttttatttatttccttcataattttttctatagtatttatactagacttactaacttttttttcatttatatccttagctatactatttaatctatcatttaaatagtttttcaacttatcatagtcattctcttctaataaatctgctaactctccaaaatatataatttgtcttaaataatcattaaacattatctgttttaatccatctaaatctaatttcgccttagcaacattaaaaaaactaacttgtccaaaataattatcttgaactacatatttataaagatttgctgtaagcctgtcatttattgattttattttaaatatatctatagtctcatctactaaagcttctaaactgtcaaattcatcataactttttatcttagacatgctatctagcttctcttttatcaggttaaatttttcttcatcaaattttttaatcttatcattttgttgtttcacactatctttaattttcttaattccatctttgattctatcaggcttagatttaataaaatttatactgtaatcaatattttttttaattctttttgatacatcatattcatccataaagtaattaaaataatactcatgaaagttttcaagaaataagctatcaaattcgatataatcttccataataaatatttcagcttgtttatctgctttctttattatatttaaaaatccaactatacccatattaaaaaaccaatctcctctataaactcttaacttcatttatctcacctccattctaaaatatctacatctccaaatccctgagcacgtctaaaaccaattcctagattgtagataagatttaaatcatcaatatcacctttcaatataaatttacctttgtaaccattaatatattgatactctttacctgttatttttttaaattctcttaagctctctttaactactatctttttgagacctatattttcaaattctaactttctttttaatccatttcccctataatttttaaccacttcattagttatatagtttagttcttctatgtatctatcatcagttatctccaagaattttccttctttagactttacacagattggagacaatgcattaaatagtaccctttcttctgttaccttcttttctcttgataaatcgattctaattcttgtaagttcataggctttatataaacattttttagaagtcattaacccattgtatatatgaaaacccaattctaaatctggagtacttatatttaatattactttatcttctataataaaattgtcaccttcaatactatacttttttatataaaccgaaaatgtaaaatttttagtttttttattattcttttctttataatagtacatgtttttatagtaatcttcattagattttcttattgcttcttttataatactcataaagagcgaattataagatattggtatacaacctgtactaaattcaattttcattttcataatatcacctctctcaattaatatattaacactagaccgtgaagtatattggtccaagtataaattatttgaaaaaatcagtaaatttttttcattttttcaatctctgacaatatatcatttctaagtctatctggttctacaacctcaacataagctcccatacttaaaatccaactttttatctcctcataacctctcattttagctttaaacattatagatttatcatcatattctatgatttgttgattattaacccaaactttttcctttataattattgaaaatggatgactaatttttataacaacattaatttcttctcctttataaattcctatactatttttactatattcatcccaactaaaacttttatctacattatatttttcttctaaaaccttataatctttaattctacataatttaaagtctataaacttaaatcttttttcacaaaaagctaccatataagtatctgatttataattaaataaaccatatggatgaacaattctttcactatttcctgaatttaatgaataatattctatccaaaatttgtgttttgtggtatatgctctaattatttcattacacttatttttttcagacttataatcacaattacgttgtgcttgaactgtaaaataatccatatatgtatcgcttttttctcctgtatttaatactgcttttattttttctacaatattattaaattcatttttgtaaatatcattattatactctaactgtgaatttatcatatctagaattgaaacttcactatctaataatttaattaatgatatgctattacatttatctatttcataaccaccataaatcccaggtgttgaatttataaatataccagcttgctctaaatacatcttgtaactttttatttgcctttcacttacttccaactcttctgataattctttgcatttcattttgcctctgctttgaattaatatcatcattctaagtgtattagctaatttactaatgagtaaccccccctaataacattaattgatatttttattatttatttctacacatatgtacatataacctctttatattttatataagtagaatttttttataattttgacatttaccatattatattttatatttgtacaaaattttaatagttaatacaataaaaaatattactgaaaaaataaacatctataattccagtaatattaattaattttaaaccctttttattatcatttaataatagtaactaaaaattgactaaatttaaccttatctcttttaaataattatttcttacaattaaaaaataaactatttgaaccaagaacaagcttcccattaccaaaacagctgatgatgctacttctatatcaaaagaatttttcagtgcagtaagggcaaatattgaatgtataacagccactacataaggaaacaaaaatactattccaatctcaattgttgaagcttttttaatctcattatatgtcatccccaatttatttaattgctcatactttttcttatcaacttggcaatccatataaaatttattatataaaaaactacttgtagtaacaaagaaaattaaacctataaatattgctaaaaatataaatgtagaatatattaatttcccagttcctatcattaattctttagagaaaaacaaatatggttgcatccctgactcattattaaatttattttcaaattctctgcatatctctatagttttacttgaatcctctacttcaaatgcagtaaatctatccactataaattttgattctatactatcataaaaattatcctttaccacatacatatttttgtaatatgctggcataacacattcttccacttgttttgccacctttaaacctctattccctacaataatattttctttgacgttattatttcctggtaaacttgatgataataatgatatgcattcattatcttcaaaacttataggcttaacccctatagtttctgtaatttctaagtacttagattctttcataattctgacattaaaatcacttttcttgggaaatacagttttaaattcaccattagtccttgtatagtctacattctctttttttagattattttctataaacatcattctttccttgtctttttctttgctatcaggctttttagggtcattatgcaatgtcattgttgaataatatattgtgttaggatatattaaattaatttgacgctctacatctttccaaaaggaataaactgtacctatagcagtaaatgctactgcagaagttatagttatcaagaaaaatattctagcattatcctttaccttataaatcaagttcgaaatccaaagcatatttgtattttttctataaaatctcttgtttagttttagcttcttcataaaaaatacactaaattgagaaaagaacaagtaagttgctactatagtaagggatgtaactggaactaagcgcagatatgttgtatattggtcggttgaggtaatagcattataatacgctattataaacaaacaaatacttaatatagcaagcattagtgatgttttaggctctggttttggagtttttgtacctttaagtaacttcaacacctgattttctttaactataaaataagtaaatattgatgttaatacagctaaaatcataaaatagattaaagtagacaatatcgcattaaatggtatatagaattttaatggcgataattctaaaaaagtagacataaccactaaaaatatctttgcaaagattaagcctattattattccaattacagaagatactatatttattatcatattttctataaagattaatttcattacttggcgttttgatatacctgtaatataaagtattccaaattctttatatctacttttaagaaacacactaactgaataaaacacaaagaagaataagaatagatatgcaattatcttactcatcttgagaccttcttttaaataatcaggaaattgagatacatctaaatctggatgacttgtaaacataataaaagaaaatagcagtgaagatgatataacaatacttgctaagtatcctaaatacgctttaatatttcttgaaatattgttaatagcaaactgttttatattcattagttatcgcctcccaataatgtaagtacatccattatctcttgataaaactgctctctactactacccttatatatttcattatatatagacccatcttttatgaataagattctactacagtagctcgctgctaatgggtcatgagttaccatcatagtagtaactttattttctttatttatcttttgaaatagctccattacaacctttgatgactttgaatctaaattacctgttggttcatctgctaaaagtattgatggattgttaatcaatgctctagcaatagcagtcctctgagcttgaccacctgatacttcaaaagttctttttcctaataaatcttttatacctaatattgtagatacttcattcaatctctcatcttgctcttttacactgaccttatctaatgtcaatggcaatactatattttctcctatagttaatgtatccaataaattaaaatcctgaaatacaaaacctaactctcttcttctaaataatgcaagttcctcacctcttaacaataaaggattctttccctttaattccatagttcctgtagttggcttgtcaatagtagaaatcatatttaaaagagtagtttttccactaccagatggacccataattcctacaaattctccatcttctatactaaaatttatgtcatttaatgcgttgaaaattatttttttaccatatactttacttaaattatttacagttaaaattttcattatttaactatccttcctaatttaatttttgaaataacatatatataattgttaattataatttatcttagtttaatttttatagataataaatctattttttctatacactaattatgttagtaaaagctaatactgcaagtactacacccatgattattctgtatacagcaaacactctcattggttttttctttaaaaaattcacgaatttttccataactattattgatacaataaaagctactataaacccaactaccaaagcaatccacaatgttggtgtcattattgaataatcaaattcaaataaatcttttcctgaagaagccaccatagctggtactgctaaaaagaaagaaaactcagctgctgtaggagaattaagtcctgctatccatccacccataatagtagatgcactccttgacatacctggccatgcagacaaaacttgtaatgtcccaacctttaaagcttgtattggagtaattttatctatattatctgttgaatgattcttttttctaaacaaagtttctactactaataataaaatcccacccactataaatcctataattacagattgtaaattaaacaatgattttatattatcataaaatagaactcctataatcgcaaatggtatacaacctataattacattcattccaaatctaaaaccaatctttccttcttttccgccagtaaatataaatttaaaaaattctataacgctatcttttatctttttccaataaagtactactactgctaatatagccccaagttgtattacaacctcaaacatttcagcaaattgccccttaaaatctattaaattaccaaccaaaatcatatgacctgtagatgaaactggaataaattctgtaaacccctctactatagctattatgactgatttcaatataaaaataacatctaaactcatcaataaacatccttccttttttacaaaatttctttttttatgttatttctctcatgttatttcttatattaattgtaatttagattagaaaatttaactatctgcaaacattacacaaaccttacatctatgtaaggtttgcaaataaactctcttaaattttgattatttaactatgaatatttcatttaataaattgtataataaaaaagtacaattaactaaaaaccctattgtaacagataatttacatctttatcaaactatttacatctttattaaagtagattgaaacttctgtaccttttcctacttctgattttatacttactttatgacctaaatcatcacataccttttttactagataaagacccatacctgtagattctccaaacttacgaccattttctcctgtaaaaaatgggtcaaataccctttttaaatctttagaaacaattccaattccttcatctattatacttaaaattacatatttattattttcttcagattttatagttaggtagttactataatctttagaatatttcactccatttgtaattaattgacctattataaatttcatccattttacatctgtataaacataagtaaatttgtctacttgaatcttaggaatcattccactttttataaataaccttttttcttcatttacaatactagatacaatttcatttaatttggctttttcaactataaagtctttctgaaaattatctgcccttgcaaaatgcatagccatatctaaccctttatttaatctatctatttcttttcttatattttcagttacttcttctccctcataatcttgaagctgaaggcttataactgatattggtgttttcatctgatgaatccattggttgatgaaagttaaatgttcactatgtatctttttatgctcttgtatcattgattgatacaatttatgttgttgttttaaaataactgatatatttctccccaagaatgagcttcctaaatacaaaaatgactcctccaaagaatgtattcctttttcaaacagattatatacttctctatttttataatacttatatattaaaaaacataacaatataaaagaactaaataaaagaatatataaactctctccaaaactaataaacttcataagattacagtaaataattgtcataactatgcctatataatatataaaaatataacctttataatcttttaaaaataacttcatactttctccttaccaattcttatttaatttatatcctaaccctcggacagtctgaacagcattatctatacctaattcctcaaatcttttccttatcctgctaacatttacatttaaagtattttcttctacaaactcaatatcatcccatatcttttctaaaagataatctctacttactacttttgggtatctcttgataagacattcaatcagtataccttcttttttagttataattagattttcaccatttaattctagttctaacctttctggataaaactttaatccatctagctccactattctttcgtctattttaggtgaatattcaccatatacccttcttatatgactctttatttttgccattactacatcatagtaaaaaggttttgttatataatcatctgctccactttctaaagctctaatttggtctacattgccatctctagctgatataaaaattataggtaaattcgactgttgtctaatacatctacaccagtagaaaccatcaaatttaggtaaatttacatctaatagaactaagtgtggcttaaaactttcaaatgtaatcattatatcatcaaagttctcttcaacaatcacttcaaatccatatttctcaatataatctttaagtaatgtacttattgatatatcatcttccacaatatatactttataactcatataattcctcctaatatacctatttactcatcatataacagtccaattttaatatattataatctttttacaatatataaatttaatcatattattaacttcacaattactgacttcataagtataaccatattattagacatcttaataaaactctataaaaaagtatctttttatgattaattaatcattattatcaactaatcattctaaaataaattgaaattactaattcaaaatagaaaaagttaccttaataaggtaacttaaacttttattatatttcttacttagtattattttagcatagtttctacttagcattatagattaattcttttatattcacttttttctcttgtaacttattttttattaagaagtcttgtgtatcttcaagcgaagatatatctttatctgttatatctaaactaaaatcataccaagcatataattctttagtttcttcaagacttaaatcaacttctttagctactttttccatagcttcatcaaaattattatttacatattctaaagtttccttttcaaccttcataaatctttcaactatttctgggtgtttctctgcaaagtctgtgctaacagcagttactattataccatctactaaaccttcaccatttgctacaagtttactacctgacttcatagctttaagagctgctggaccagcaatcaatgcaacatctacgctaccatcagaaagagctgctgatgcttctggaatacccatattaacaaattccacatcatccatacttaatccttctttatcaagtgctgaaatcaatacctgatgtaatatagtcccttttggacctgccaccttcttacctactaaatctgctgctgattttattgaattattattagtcaaaatcataaatccttttggtgacctgctataagtgtttaatatctttaactctactccattagatgcagctattaaagctgacgtaccacctagtgcatgtaagaagtctatttctccagcagctaaagcctgtgtttgctctggacctgtagtaatttcgtgaaagttaacttttatattatcctttttaaattcctttccaaataaatcatcctgtttctgaattatagaaggaacatttaatggtgattttacataagttaaatttatttctgaaagtttttctccattattttttttagcacatccagctaaagatgctgttgcaagtgttaatatcgttatacctatcaatagcttttttaatttcatttactctactccttaaaatattattaatttctttaaatgtctttatttgatttcattgtcattaaaatatctttttttaatttaatatagtactctgaagttaaatctctattataaccatcttctatattaaattcttttatttttctttcgtctgtgaaaacaactatttttttgcctatctttaacgcttcatcaatatcatgagttacaaatattacgcctttattagttgacttatgtatttttataacttcattttgcatatcaatccttgtaaaataatctaatgccgaaaaaggctcgtccataagcaacatatctggattgaaagaaagagctctagctatgcttactctctgtgccatacctcctgacaattcatttggataagagtttttaaatttctgcaagttcatcatcttaagatatttttctacatcaatattacttttcctattatatttatttgatttgttcaaattatcatttgtttctaagcttctaaaattatcatttataattttaccaataattcttttattgtgtttaaattttctaagcaccttgtttaaaatagtattttttctttgattatgaaaagctatattttcacttacgtttaaccaaggcattaatctgctctcctgaaaaacaaaaccaacattaggtctatactctttattatcattaataaacctaatctcaccactatttataccttcaagtgatgcaattgctctaagcaaggtagtctttccacaaccactttcacctaaaattactgttatatggtttctatctatgtttaaagagatatcactaagaactacatgttcttcattgtcaactttataacttttatataaatttctaattatatatccagagtcacatactaaattattcatatgcttccaccatctttcccttacttaccttcttcacaataatcgaaaatatgtaatctgtaattattcctaaaagtccaattacgattatacctacaataacaacatctgttctagacatttcttttccatcagatatcaagtatccaagaccagatgaagctgctacaagttctgccccaataattgctctaaagctatatccaagagctaactttaacccaacagcaatatcaagaatggcatttggtattattattttaaatattatctgaagctttgaaaactcaaatactctacccacttcaatcagttttgagtcacaatttttaatccctttcaatgtgcttgtaaagattgggaaaaaggatgctaaaactataattataatttttgattcctctcctataccaaaccataatataagcattggtattaaagcaaggggaggtgtattccttaaaaaatttattagagatttaaagtattcgtatactccactataaattccaaagaatatccctaaaggcacacctatagcagtatttattgcaaaacctatcaaaactcttttcatacttgcatatacattaataaatattgaaccatcacttatcatatttaaaaatgtactatataccttttcgggtgatggtaatatataatcactccaaataccaagataatttgtaattttccataataaaagaattataaaaaatatcagaacactctttactagccttaaaaacttattattaaatttattgaccatttacaaaccatctccattattacaaccatctttacaataaaacatttctactatgtcatacttatcttcaaagccatttcttattttttgtatttcacttaatatttcgtcttcacttgatacttcaagaactttttcaaaagtatctttgaaatatcctaatggaattggtgattcatctatttttccaagtgattttacaccttcttgttcagcaaactctttccatgtataaaacatagcattacccttatccttaaacttttcacttgcaaagtctcttaattgtgtacatggacaggttactaccaacatatcatctttactttttatatatttatcgtataaaaccctacaagtccttactaatattggttctatcataggtacttcaaaattatttatcaaattatttctttttaaaagacttatactttctggacatctacaatccaacattgtattttcagtcttttttgtatactctttgtactgcttttttacatattctaactgtggttcacattctgctattatgtaccccttttttatcaaatttgctttaataaggtgaaacttttctccatacattctttctgccactggatttattagaagatatttattcataacgcctcctattatttaatattgaatattattatcaattaatagtttaaatgagcacttaaattttgtcaatatattaatttttccttaataaaacaatttttatctacattttttaatattttaaatgaaatattaaatagtatatgtaatttattttaattaataatgcatacatcttactaataatctatttatataataatctataaatattatataataatacttatataattagtattattatttaatagcaacagttattcacactaataaaagtagaaagtttttaaaatattatgaaacatcaaatttaattttaaaattgcatcaaaaaatgaagtctcaacagacttcactttttataactcttataaattattcaaaatatttatacttccctttctacttcaaaacgtaaaaccgtcttcaatgattcaggcgatacttttctagcatcacttatataaatttcacgatgtgtgtaagattttcttataagtttattttttttgcaaaattcgttcataatgtcaaaactttctggttcattatcatatgaacctatatgaagcatttgaacacatagcccttcattaatagacccaaacctaactttttcaagaagattatgaggtttcttcttctttactatatcagtagctttatccaacaggtcttgtgtaacaaaatctggctgacgtatcattatagtgtaaattaaatcttctttaataagtacatctaagcctttacttttttctcccttatcccatataccttctaaaggaaaaaccgtatagtcaaaatacccttctggtacaattccttttttaggcatggtttttattgcatatgccaaagaataaagtactcctattgcttcaataaattctttagaatttgggtctccactcccttttaacatgataaatttctgttctggtatttcaattattacaggattctttttaggtaaatataactctttatctctttttctccattcatatttcataaaaatacctccatatatattttatacattgatattatcacgctaaaagtgacaacagtgtgtcataattataaattatattataaaatcttcatcctctaattcctcatacactcctttttggtatccattacccttagttgaaaagaaatcatgtgttttggtttcagtgctaagaccatttaatacaattggatttatagcatctacagtatatagcttctcaaaccctagattttctaaagctctattcgcattgtattttaaaaagttcacaacctctttttcaagcccactttctctgtatataacatttgtatactctatctcattctccataaggctataaagtatagaatacatcttctcttctaacatcttcttatccattttatcaaatgaatcgtatatttcttgtgctagcaatcctatatacttaccatgtaaagactcatctctaagaataagcgatattatttctccactagctaccatctttccttgaccagatagatacaatggataaaagaatcctgaataaaacaagaaactctctaaaaatacacttgtaaccattgataggtataatccctcttgatttgtagtattttcgtattgagctaaaactaaatcagcctttctttgtaatgttggttctgtttctatccattcaaataattcatctatttctaaattagaaagtagagtcataaatatagaagaataactttttgcatgtatttcttccatagtccccataaaagacaagacagcttttctttgtaggttttctgttaaactcatcatagatggtattccattattcccctgttttgtatccagtaatgttaaaccacccaatacttttttatataattccttttctttattacttagttcattccatacctttatgtctttagaaacagatatttcttcaggaagccaaaattgttttacattttgttcccaaaaagcttgtgtaaatccatcttcttctctattccagttaactgcattatgtattttatgtaaattaaatgtcatatatttctctccctatactgaacacactagacactcatgagtatctcttgtcatctttgttcttgtgtaatataaacttttcaaaccttttttataggcatatatgtaatgtctagctatatctctagttgtcttttcatctgtaacaaacagtgttgttgatataccttggtcaacatggttttgaactgttgccactaaatctatgacctttctcatatccatcctgtatgctgattgataatacaacatattatcatttgttaaaaatggcattggatatattgtagtagagtctccatatgttcttacttctactggctcagtaattggcattatacttgatgtagcattttgaacataactaatgctttgagttggtgctactgccattaaatatgcattatatatccctttttcttttacttcatccaataattttgtccaatcttcttttgttggtatataaatcccttcaaataatgctcttaccttttctgacttaggtagataagattgttcatagtattttgataaaaccttgctatttcttcccttaacatattctgatttatcaaatccttcaaaagtttgatttctttctatggctattttcatagaagctttaattgaatagtatctaaccattgcaaaaaatacattagaaaaatctatagcatcatctgaagtatataaaatattttctcttactaagtatccatgtaaattcatagctcctaatcctatagaatgagacttgctgttactattgcttaccgttggcactggttttatatctgtgctatctgctacaaatgacagtgctcttattgctgtttcaactgtactttctatagttttattatccattacattggctatgtttaaagaacctaggttacaacttatatcttgtccccattcattttttcctccatacccctctatttctgaaggtgtttgatattgaaatatctcacaacataagttagacattttaataattccaacatcttttaatgtatgttctctattagctgtatctatgtacactacatatggatatccactttcttgttgcatttgtgctatttttgtcaacatctgcctaggatttatttctttttttcttatatcactatcattaaccaatttatcataccactcatccatttctatctcatcaagagaaactccatatttcttatacacagtatgaggataaaatgcatatgctacttcatttttttctgccaactccataaatttatctggtattatagctcctaatgataatgtagcaagtcttattttttcatctgcatttatctttttagtatccatcaacaattcaaaatcaggatggaatacagtaaggtacaccgcaccagaaccttgtctagctcccatttgattaaagtaactaaatgattgttctaacattttagctactccaacaacacctccagctgcaccttctatatctttgatagattcgccagatgctctaagtttagataaatttagtgcaactcctccaccaatctttgataagtgatttgatgaagatatagcatatgatataccttctgtactatcttctacagatagtaaaaaacatgataccatttctccagccctctttcttccagcatttaaaaaagtaggtgtagctggttgaaattcttgttttactattttatctgccaagtttaaagctaaatctttatcgccatttcctagtgtcaaagctacaattaacactttatcattatatgtttctaatatttcctttccatcattgctctttaatgcataattttgataaaacttatttgcactcatatatgattgaaattcaaacttatgtttatcaatcatatcatatatatttttaataacatctatgctatactgatttattacttcttttaaataataaccttcatctattaaatacttcaatctttcttctaggttattaaattttctcaactttggttgtataaattcttctatgtaactacttaaggcttccttatccttttccaattggtacttaccttgttcatttttaattatcacttgattgttaagctctatccaattcattatttaccgtccttttaacataatcttgtgccataatttcacttaatttgcttattatttcttttggtacttatcagttgaaatcccaaaattaatctataattatagaaatgcaataagtatttttcaaaaacaaaagcactacatatagtcagtgctttatctattatatactacatatagtatatacacaaatttttttatatctaaacttttattactttataattgacattatttttatttaaagaaatttttatcaactcaaatataaaaaaatacaagcttattatgtcctgtttaaaaatttaaattatctctaaatagcttaaaaatatattctgatatattgaaaaaagtactttcaagatgatattttatatattatttagaagttttttatttattgttatataattaaatatatgactattttgctactacatatataaaaataaatttatgaaggtgattttaatgaaaactatttctaaacaagaattagaaaaaacacttgagaaacattatttatggcttaaaaacaataatgctggagaaaaggcagatttaaaagaattaagattagaaaatatggacttaagaggatactgcttaagtaatattgacttttcgtggtctgaccttatcaatttaaatttagaaaaagcagatttagaaaactctatttttaataattcttatctttcggattgttcattaaaaaattctatattaaaaaatgcagacttaagtggtgcaaattttagattttgtgacttatctaactcagatattagaggagctaatttagaaaattccaatttagaacatgctactttaaatggagtaatatcagatgaaagtacccctttttttaaattgtattgtcctgaaacaggagcatttataggctataaaaaatgttttaatttcagaatggtacaattattaatacccagcgacgcaaaaagagtgtctgctacatcaaatgcttgtagatgtgataaggcaaaagtactgtcaattactagtatagatggtaaagaatcttttaaaagtgctcgtgcatatgctgatgaaaattttatatatagagtaggagaaacgattgtagctgaagattttaatgaaaatagatggaaagaatcgactacagggattcacttttttttaactagagaggaagctattggttatctataaaatgctaaagttttataaatatataaacaaaataacaaaagagtatagattgtaatttcaaaaaaattataatctatactcttttttctatagcacataagtacattttatttcataaattataataaattatttatatctgcactattgattatttgagaaactttatctatatgttctatcttactatccaaactgtcataatacttcttactctcatctctatttctaaaagaataaacttttttatccagttttaaagcctcttttataatatctatattcctcttatttgtctctcctacactaaatcctgtatctattataatcttggaatcatttaaatttctaatagccaaatcgaaactctcatcacttatcggctcaaatggattttctgtaaacatctttatccccatagttctaccaatttcataatcaatatcattttcatgtattattccagaatacagacctataccttttttagtaaaagctctataaattggtgttgctttacccccaccaccaattataaaaacttcatttttagatttattactaatttctactgaacctaaaagactattaaagtttttatcatccaattcataaagcgaatttataatatcctcatctactacatcttcaggctgaccataagctatgactttattattttttataagagcaactttatcacaactttttaatgctatgtctatttcatgcaatgaaagtattactgatattgacttttctttacttaattttttcagtatgtttatgagctccaatctatgttttatatccaagtgagttgtaggctcatctaatataattatttctggttcttgaacaagagctcttgcaaccaacaccttttgtttttctccatcacttagttcatcaaaatatcttttctttaaatgtaaggcatctacagactccaatgcttcatctaccattattaaatctttcttagatagactcccaaaaaatcctgtatatggataccttcctatattgactatatcttgtacagtcattaaatcacctaataatctatttgtaagtactaaagccattttttttgataatgcttttcttgatatacaatttatgtttacaccattcaaatatatttcaccttttattggtgatataagtttagataaggaccttaatagggtagtttttccagctccattacttcccaaaagacatagtatttctccattttttacttctacatttatattacttataactaccttgttattgtatcctacacttaaattattagttttcaacatgtctaagccctatccttccttttcaccaataacattactacaattggagctcctaataaagatgttatcgtgcttattggtaattctactggtgataaaattactcttgatattaaatcacaaagagctgtaactatactgcctaaaaatattactactggtatcaaaactctattatctgatgttttaaatctgaacctcccatgactaaagtcacagggttcctgcttcatagaattttgcatactaaaatatgtcttactaattctccacaggccatccccatagttcctacggttcttacataagttatttattttgaattgttattagtcttaatccttcttttaatatatttatacttgcatttatatctctattgtgagtttcattacaactaggacaaatccattctcttatatttaagtccttcacttcctcgtttttatacccacatttattgcatatttgtgaacttgcaaagaatttacctacctttacaatttttctaccataccaattagccttgtattctaattgacgaacaaattctgaccatgatacatcagaaattaagcgagatagtctacgatttttaatcatattctttacttgtaaatcttctatgcaaataatatcgttctcttttattaatttagtagatagtttttgcagaaaatcatttctttgattagctatatgttcttgaagtcttgcaacttttaatcttgctttatttctatttaaactaccgattgtctttctcgataattctctttgtaatttagcaagtttgtttaatgacttcttaagatacttaggattttctataaattctccacaacttgagatacaaaattctttaattcctaaatctaaacctatatgattattagtattttcaaatgcttcaatatctacatcagtacagcataatgatacataatatctaccacttggttctttagatatagtagcattaagtattctccctttaggtacttgtttatcccttatcttaaccataccaagtttaggtagttttatatgttgaccacaatacataatgtttccatttgtaaagttagttttatatgaaaatctattaattttctttgatttaaatttaggaaatcctactttttctttaaagaattttttatatgcattatctaaatcttttaaggcgttttgtagtgaaaatttgtcaggttccttaagccattttaattctttttttaaattgttcaaatcagaactacactgtttataagtaaaagtttctttattgtttttataaacatctattcttttagcaagatacttattatatacaaatctacaacatccaaaagttttgttaattaactcttgttgctttttatttggatacattctaaacttataagctttttccactactaccacctcactttacttgttttttctgattattaatatattttcttatctgctcctctgtattttctgatacagtagcaacgaaataactaggattccaaagatgtctccccataatgctggctgtctatatttgacatactatatgcatatcctctaccatgagtaacttccatttttcatcacctatcataatattaaaatatgcaattacttaaaacaagtattttgaaggttttttatatttaattttaaataacatatataagaaccataagtcttaacttttatcatttttgaggttgtcgttcacataagttcgctactacctatgcagttctcttatgaacttcttacactttcatgcaagcacagactatatcttatccttcggcattatccgttaaggtctacccacttccactaccaatagcttgtagtgtacttccctcaagaggaatagtcgttgaagtttctcctattcggagcttacctgctgattgcccattttaaagtacttagggtttaaccttataccatctaaccaattttttctactttcgtaactttcacacttaggtttatttcatccttatgttttagtttggttagctttaggggtttccagcaattcaagtagtattggataggttctatcctatctctacatataggtttccctatatgctgactattttagctactaactcatgactaaagtcacaagtgtgcgtagctattttttaatcaattttgaaatttgtggcactgcaagtccaataaaccctataggtcctgcaaatgctgatactattgctgctaatatactagatataaacactatcaaaactctaaaaaatcttatatttatgccaatactttttgcatactcttctcctaataaaaaagcatttaaaggttttattatgaatacagtcatcaaaagacctaatataccaactattataagtatttctaccttttcccatgtaaatccagaaaaacttcccatagaccacatagtaaattcttttaatttatcactatttgcaaatgattgtaacacatttgttataccactacatacatatccggtcataattcctattattaaaagagttgttatattctttaccttatttgcaaataaaatgactatagacattacaattaaagctcctataaaagctgctacaaatatactcattgaatttacactctcaaatcccaatgtgtatcctcccaaaatcatgagagctactgataaagtagaacctgaagatactcctaatatatacggttcaactattgggtttttaaaaaatatctgtaataaaatacctgatactgctaggcatgctccacctaccatggttgcaagtactctagggattcttatattgtatattattttataatgttctgtattatccatacctcttaatacaacatctattacttctttaaattcaatttttacagagccaaatgctacacacactaaaaaagtaagtatcatacttataattaatactataaatattgtcgtattccttattctcattttattgataaaatccatttgtatactcctcttagcaaagttatattaactaaaatctataaaacctatctttttgtgtcctctctgtactatttatcataatttatataatgtttgattttttcacctgtagtacctgggtggaacatctcaactaaatctactattaattcgtccgtcttatctactgattgataataatctggagcaaacacccataggtttccgttttttacaacatccaaatcagccaatacaggtgcactagattttatagaatctaaatttggtgcataatctgaacttgatgagtatacaaatatatctgcatcttttgcaacttcatgcaattgttcaatacttactcgcccttcatttgaatctattgaagcacatgcatttattccaccagccatttttatcatattatccacatatgaatctttaggagctatataagcacttccttcatatacagatgcccatacaactttaggtttagctttgttttttatttttttacttacttcttctaccttttgtacagttttatttagttcactagtagccatatcttctttatcataaaatgcagctattaaacttgtccactccattcttccaaatggattttgctctttatactcattgtctacaacataattaagccctaattcttttaatttgtcaataaattttgtatcagcctctgataaaccactactcactatagttaagtcaggatttaagtctactattttttcataatctggtgctaaatttgaaccaacgtaatgtatttttccatctttcattaaatctttaatttctttaatagtccagtactgctcttctgttgttacggcttttatactatctagttcatctattgttctcagagaacaagcctgtgttgtagatgctattaatacattgtccacaggcgttctaactatattagcatttttatatttttcaggaattttaatcttctttgggattaaaatcagttctcgattatctccatcagttacttttttaattccatcttctaaatcttcaacactaaatccactagcatattttaattctaatttcttaccagtactagcttgtttattctctttgtcacttttactacaccctataagacctcctaccataaaaattaccatagcaattaaaaaaaactgctttaaaacatttgatttaaatttcatctctttcactccaatatcttattttttatgagtggctaaaaaactttaataatatatgctttttaaagtatacttattaaagttatcctaaagtcatctttaataagtataaccttttaataaaataaaaaacttctcctaatttaataaggagaagttcatatatcaactttacaaaaacgaattgatacttcattttattataaattacaatctccaccctaaattgaacttatataatactgggcaggtctcctgactcacggcttttcctccatcacccttcccaaaatttttataaatttcagtggattttgatttcgtatccgtatacagtagcgggggctgtagtgaattttcatcactttccctattaaactaatatagtaccctagtattattttaatttaatttttattaagataattgtaatttattgttgacctctttgcaaggttgatttaacatatatttaatttattcatcaattttttaatttcacatacttgtttttcatttggttttacaaatggagcagtcatataatcacttatttgtaaccctctgatattcatagcttttttcattgctggtataaatggattggttattaagtaaaaatccattgctttattaatatatttttgaatttctataaccttctccatatctctattattgtaagcttcagcccatttggagcaaacttctggaattaaatttgataatccccctatacaacctgctcccccagacattagattatgtataaagttttcatcataaccactataaaccttaaattctgggaactctattttcatagtatttattaaatctctggtatgtcccatcaaagttactgtatccttatatccaactatgtttttatgttttcttgcaagtcttaatgtaagttctggacttaaatcataaccagttctatctggataattgtataaatatatttcagcctctgtattcttagctatttcactataaaataactcaatactatcatcatcaagagagaaataataagggcttattatcataacgccatctgctccactattatgtgcatagtttgaaagttctatagattcatttatacacatacgacttgtacctataaacacttttactctcttatttacatgactagttactaaatctataagttctttttgcatatccatagacatattaaagaactctccagtacttcccattatgactagtccatctacacctccatctataagatggtcgtacacttttttattaccttctttatctaaatttccttcttcatcaaatattgtaacaactggtgtcaaaaattctgctttcataatttaaactcctaaaatttattttaatatgttcattaatacatcagatttagctttaatattaattatattaaaacatttacttaatgtaattttttaaaattccaatactctcaatctcacattcaactacatctccactactcatatatcgaggaggtgaaaatcccatccctactccagaaggtgttccagtagctataatgtctccagcctctaaagtcataccttttgaaagttctgaaactatgtctgaaacatctgatatgaataatcctgtattagaactttgtctttcttcaccatttaccctactacatactttaagttttatgggaaaaggaactgcacttttatgtaaaatacatggacctaaagaggtaaatgtatctaatccttttcctctaaaccattgaacatgttctttttgcaactttctagcagaaatatcatttataacagtgtaaccaaagatataatcttctacctcttcttttctaatattaacacctgttttacctattactactccaagttcaacttcatagtctagttgattatttatctcaaaatgaccatctatctcatcttctggacctattgcctttgtcacacgttttgtaaaataaaccgttttttgtggctcttcaaaactatcatcaaagtgagtttgagtttcttcaagatggtctttatagttcactcccacacataagatatcatgtattggtttttctataggaacatgtacagtacatctctctcttttaaaaacatcataattatagaatatactttcatttataatagttttcaacttaataatatcttcactagatacattttgaattaattcatttaaatccttaaaatttctactgagatttaaagagttaacatctataataaataattcatctttagaaaaaactccagttcttttacattcattttctccttcagtaaaacttacaaacttcataatctcaccctttattaaaattctatgtatttattttcttacttaaagattatacatagttgcatactctagctattgccatttcagtatatccaagggactctgcttttgattgttttccatttgctacatctacaaccatatttaacaaatcatctgttaattcttccattgtttgtggaccatagataactggactagcatcaaaatccatattatcttccatatttgcaaaagttattttatttccagttatttttattactggtgctattggatttcctgatggtgttcctcttcctgtactaaataccactatttgtgctcctcctgctaccataccagcaacagatgaagcatcatttccaggggtatccattataacaagacctttcttatcaatttgtttggcataatcatatacttcacttatttgtctatgacctcctttatgtatacaaccaagtgatttttcttctaaacttgttaaaccaccagctatatttccaggagatggattaccttctctaacttcttctccaaccaattttaatgaattttcatatctatgtactatatgtaatattttttcttttacttcttcatttactgctctcctagctagtatatgctctgcacctataaattcagtagtttcacttaaaattgatgttgctcctaaatcgacaagtttatcacttaattcacctattaatggatttgctgctaatccacttgttgggtcagacccaccacattcagttcctagtataagttcagatattggaaattcttcttttctaagcaaagaagcttcttgtgccatttctctagcataacgaacagctttttctatagtttttaaagttccatgttcttcttgtattacaagagtttttattggcttatttgttctctcttttattgcatcaactaccaaatcattttggcaattttcgcatcccaaagatacaactattacaccatatacatttggatttgctgcataaccagccataacatccatagttaattgttggtctgaatgtacttgtgaacatccattctgattattaaaggtaactgccccttgaacttgtgatgctattattctagttgtatctgatgcacacacactcgtaggcaatattaatatgtggtttcttataccaactcttccatctggtcttttatatccataaaatttcatactgatttcctcctaaaatagtctatatactttttataatttttatatattataatttttattacactcactaatcaaacagctaaaatcctatttaaaaactatttgacactaaaagcaatgaatacaacttttataactctataaatattattttatatattagtcataacttgtttatccaaatcctctctaacacttctaacattatgaatatgtacatgttgaccactttttatttcctgatttgcttctcctatatgttcaccatatttagtaactttatcaccttgggccatatcttttatagccaatttatgataaatagttatattatctagtgctgtaatcgtttttactgttttgtcttttaatttaaaactaatttcattacctttagctattgcttcaatagctactgcaacattatctttttcatcaattatcactgcatttatcattattcttgctctcctttataaataatataattttattaatatcctaaaatctaattaaagaatttattattttaccaacaactcactgtaatataaattaagctgttattgtaccatcctcattttgttttgggaacttaggacatccatacttcttagcccaccaactagttataagaggtactaatattgcagtgacaactactgcggctgccacttgtgttgtagctgttgcaacatatggttgccatgatgggtcaactaatgcaacagcagcaggtacagcaattgcatttccagcggttgtagctacagcccatcctgcatatcctggacgttttcctataaatttatcacagaatactataaatatacctcctacaaatacagatattaatccaagtaatactcctgataaacctccttttagtatacttgcaagatttatgctactaccaagtgcaaaccctacaaaaggtacgagtaaattacaccctggctctaaaaactctttcatttttttgtcaaaatttcctattatcataccaacaagtattggcactattgcagctaataatgacaacaatggcacatttgcaagacctgaagtcccaagagctattaatgtaaaaaatggtccatcatttaaagtaagtaaactcatagttgcacaatctgtttcatctccatatgaagtcatcaatgaaagatatatactaccattactatttgtaactgcacttataacagccaatgttgtaagaccaaggacaccatccattccaaatagctttcctataagtatacctatcaaagcacctatagcaaatttagaaccaagaagtataccacctctctttaaaacttttggcatttctctaaattgaagctgagttcccaagcataccagttgaaccccaattatagttgcagacccaacacttgaaaatactgctgtcgtaaacgaacctatttgtacaatatctgggcaaaaggtattaatgaaagctgctataaacattggcactatcatcatacctgcaggaatttttttaataaaatccattatcataaagttaatcctcctaaaacatgatatttaattactcttattaagtttttagctttaattctaacggccgtttcggttcgtatttaagaactaagtttttaattacgaatctttgaattaatgatagcattttcctatttatgagtcaataaaaaaaataaatttttgtcaaatttttttcaaactttctgataataccttgtatattatcaaatgacttccttatatgcaaaaatacagcgtatttaaaattatatagtattcaaaactataaagtttttatacagtgtaaaaaatagataaaatataaattcataatattttgatatttacatataaaaataactattgcatatatttacttaaattatataactaaatatcacttactttctttaggtatattttggaaattagttattccttaatgtacagtctaaaaaaatatctatctgtatctaaatcaagagcttatttatatataaatttacatatttattttctacattgtaaaatatcgtatagtgtgctaaaatcaacatattctaatactttaaattaataaaaagagggggaaatttatgacttcagataatcatcgcccaacagctaggatattagatattttagaagcattagcagaatccgaaaatggatatactcttacagaaatagcagatgttatcaatgctccaaaaagtagcatctttcctatagttcatacacttaatgctagaaaatacattactattgataaaaacacatccaaatattctatagggatacgttcttacacattagggtcttcattttttgaaaaaagaactatttttaactatataattgacgaaatgactaatatagttaattcctgttctgaaacttgtcagcttggtatacttgacaataatgaagttctttatattggaaaagtagattctccagaaccaattagacttatttcttatgttggaaaaaaaatacctgctaattgtacaggtcttggaaaagctcttttatgtgattttgacaaggaaaaactaataagcttatatccagatggtctaaaaggttttacagaaaaatcaattacagattttgatgttttatacgaccagcttcttgaagttcaaagaacacaaatagcttcagagtgtgaagaatcaatggaacacctaaaatgtcttgccgtaccaataagaaaaaatggatgtataagagctgctgttagtgtaacactgcctttatttagagctaatgacgaaaaaatagaactgataaaaaaattactcttaaatgctcagaaaaatattcaatcaatgatggaagaacgtaatgaagacattgtaataaattagattaatattctgtatatggaagatatcaaaacataataattaaaaattttgttttaaactaatgtatttatttgatttatactataaaaacaaagttgctgatttaactacagtaactttgttttttttataatattttttatatttttattgacatgataaaaatactatgttaaattctaatcataatcgtaattacgaattaagttcttatataagaaccagtaaccctatctcaatctaagatacgatatattatgagtaaattagtgaaaattgttagatatatatttttacataaaaatcaatgaaaataaaaggagattttagttatgagcacttattatgtaccaccaataaatttacttgggaaaggatgtcttaatgaagctaaagattcaattaaatcattaggaactaaaaaagcatttgttgttagtgataaatttctagtttcaaatggtactgtaaaaaaagtaacagatattttatctcagatagatgtagactttgttgtttatgatgaagttaaacaaaatccaaccgtaactaatgtggataaaggacttaaaatattaaaatcagaaaattgtgacttcgttataactataggaggaggttctccacaagactgtggtaaagctatctctatattagctactaatggaggagatattagagactatgaaggtatcaacaaaacttctaaaaaatgtcttcctatcgtagctataactactactgctggtacatctgctgaagttacaataaactatgttataactgatgaagacagacatgtaaagatgataatggttgataccaactcactagctacaatgacagtaaatgacccagaattaatgattagcaaaccatctaatttaacagcagcaactggtatggatgcactaactcatgctgtagaagctgtagtagctaatggtgcttatgatgttacagattcaactgccttatatgctataaagcagatatttaaataccttccaagagctgttaaaaatggtaatgacatagaagctagagaacaaatgtgttatgcttgttttttaaatggaattgcctttagtaatgcaggtcttggaaatgtacatgctatggctcatcaattaggaggtttatatgatttacctcatggagtatgtaatgccatgctacttccaatagttgaggaggaaaatgctaaatcagcccctgccaaattccgaccaatagctgaagttattggaatggatgtaaataataaatcagataaagagtgtgttgactttgtaatagataagataaaagctctttctgaagaggttggaatcccaaaatctttaaaagatgtaggtgttgataatcctaattttgaattgcttgcagaaaactctatgaaagatgcttgtgctggtgctaatcctgttttctttgataaggagaagattatagaattgtttatgaaaatatcttaattatgtatatttataagagagtgcctcaaaatatctttgttttgttaatagcactctcttattacactttttaaatagtactctttatgaagaagttaatatataatcctattaatttgagaatcattatcccaataaaaactcaaaatttttcttaatgaattataactgttgttgtatctggtatattatcatatatccactttgcattttccgtacttaatcttatacatccatgactaagagcttcaccaagtctgccatctattatataacttcctgttgaatcatatagcacagaatgatagtaatatccacctttaattctagtagcatacttaactgaatactcatccgttccaaaagaaggttttcttccacttatataaaatatacctgttatagttggagtctcaggcttgcctatagtacattgccacttgtaaagttgcccccagcctccattatctttcttaaaaatataagtatatttatttctaaggtctgttacaattagataatcgctagtacttttaatattattttcgttaacaaatttaatcatgtcagtataaaaatacttataatctaattcatttggtttattcccatcagttgataaaaaataattaaaaacatatcctattttatcatcatatacaatcttactccaatctccatctacttgaaggacttcaaccctagatttttcaggaattactgtaattatattggaagttatagatttatcttctcttaagtttaagttactccaagcatattcgcttactgataccaaatccttatacacatatccttcttgagaattgtacatcaccttaatccagtcatcttcttcatccaatacttccattttagctccctgaggtattactgttatgatacttgaattagtagatttagcagacctcaaatttacatttgctaaagcatatttatatataggtgctctatattttttaatatttagtttagttaatttcacacatatccatcctctcatatgtctttttacaacattttatgaaattcgatatgtattcgttctcctattttcaaactttacttgtattactaataatattgctacatatacttatatattctcacctctatttatctatttatttaaatttatgatattacattctttaatatactcttcaattatacctctagccacattaaaataacttatacacttgtcaactatgactgcatcactactaactactctatctaatttttccaatacaacatctgcattttttactaattctacttcagtttcaattccccaagttttggcatgctctaatatcctatactttaaatttcctgaattagaaactggagcatctaaataaaatttaagattctgtgcattgtatttattaaaaaatttacctatcagattcaaagcttcttctgttttatctataatcttataggttcccctaagacctgctaaatctcttatatttccatcacttcctattactagagtaccaccagataatgctacctctatggatattatcaaattaaagccatctatatttacggtatcttctttgattttatctagaaaaagcctttttgattgtcttataatatttttttcatcagtacagactgctctttttaatgcatctctttgtcttatagaaaactgatatctatcaccaacaaaagtaacgactgggtctattttgtaatccctatttaataaccattctatttcttctttagcctttataagtcttgttaattctttacttgaaaaccatcttttatcactatcatcaaaccctcttttagatatcttatttatatcatttcaccaccttgctttaaagatataactgtactacattaaatacagattatttcaccttttaagataatttttaataccattatcttatccatttagattattcaatatttataattaattataacgcttaacctcacttaataatacagaataatagattctatattatatttataagtttataacataaataggtagtgttttaaaataaactttttagttcataagataatcttcttttataaaatcaaatatatttttatcatttaaaaagtaaaaaagagacttatctctattttttgagatagcctctttctaaaatctacttataatgataattttaggtttatatattaaacttatgttatacttcttttatcatattaggagatagaatatcattaagagcttctgtcatagttggatgtgcataaacacggtctcttaaatatgtatactctacttctaaatctacagctaattgaataagatggataatctcacttgaattttcacatatcatactagctccaagtatcttattggattttttatctatcactatttttataaacccatctgccttgccaatctgtttagctcttggaattgcttctactggcatctttgccactaatacttcatatcccttttctttagcttgtttaacattaagaccaactcttgaaaatgctggacttataaatatagaatttgggatattctttctatcattagttgttctagtcttatctccaaataactgattaataactatgcgataatcatccaatgatatataagtaaattgtggacctccatttatatctcctatagcccatatatgctctttattagtcttaagagtttctgagactttaataaatcctctttcatttaattctatacctgcattttctagccctagcccttcagtgtttgcttttcttcctgtagctacaagtatcatattacttgttaattctttagatttaccatctacttcatattctactattgctgattcagaaacttctttaatctcttttatatttgcattattaacaatttttacatttctctttgcaagtaattttattatttcttctgaatcctcaacatcttcatttggtaaaatgccattattagagtttaatattgtaacttctgctccaaatgaactataaataccagcaaactctaaacctataaatccagctcctataattgtcatttttttaggtaaaactcttagattcataagagactcactatcatatactatattcttattttcaattcccttaatattaggtataaatggtcttgaaccagtattaataaatatattatctgctactaactcataaatttcattttcagttttaacttgaactgttttttcatcaatgaaagttcccattcctgtgaatatagttacattctcatttgaatttaatttattatagttagcttctctgagttttgtaattaaagtttcttttttatctatagctttctcatattcagcttgtacttcatcccaagaatttatattctttgtttttacgctgtttgctgaattttctaagctttttgttggtatacatgccacatttacacatgtcccaccatacatcttgtttgacttttctattaaagctacttttaatcccctgtttgccaaatctcctgctaatgtttttccaccttttccaaatcctattattatagcatcaaatgtttttttcatataaaattcaaccctttcttgtattgtttatacttttactataacaagattatttaggtggtacaattaggcacttttttgtaaccttaaattgattcataaacatatacttaaatacttttatttatttctctgattttcaataaatgatgccatagttgccttatccatagctcctggaatatactgagttacatatccttccttgtcaattataaatgtagttggaaaagcattaattccatattgatatgctaatgctccatcttcatcaagtacaacagggaatgtataaccttggtcttttaagaagttaactacatgttcccttgaaccttctctacctaaattaggtgaagctactcctaaaattactacatcatcattgtttttattatagtctttatacagttgttctatataaggcatttcttctttacatggaggacaccatgtagcccagaaatttaagaatacaactttgccttcataatcacttaatttatgtgttttaccatactggtctgttaaagtaaaatcaatagactttattctatcttcatcattagacccgttatcattattgtcattattagagtctttttgactattattaccatcagaattttcttctttatcagtagaattttctcgcttattttcttcttgcttgctttcaattttgctattttgtgacgtattaaagtgtttgcttatacttccaaatccatttaccatcattaatattcctgatactataagtataatcccacctatttttttaataatttccatgttagattttatcttatctatagttttaaatagtttactgtaaaacatagctgtaattataaatggcaaaataaaaccaatagtatatactgctattaaaagattggcactaagatgattacttgaacttgaaaccatgactaatacagatgccaatattggaccaatacaaggtgtccatccaaaactaaacgtaaaacctaatataaaagctgttattgctttcatttctttaaacttaacattaaatcttttttctctattcaatattgaagatttaattattcccatgtaaaataatcccatgataataattataatcccaccaataaacattattaaatctttattttcattaaaaaacatactcaatacttttactgatgaacccaatataaagaatgttgttgagattccaagagcaaaaaatatagtatttttaaataaagaacttcctataaaactcgtctttccttcttttagattttctacactactatttgacaatatactcaaataaataggcaaaattggcagtatacatggtgaaaagaatgatactataccttctataaatactaaaaataaatttacattttgcaaattaaaattcctccttattttatttccaatattacaatcccatttctaaattaaaatctaactaaaaaattatgtaattttaatacatttttctactcatagcttaattaaattttcattacttacagagtaaattttagtatttatcacaatttaaatttttattgctccacataatcattttttccatgacaggaagcaatcgtaatcctgattcacttaaaaaatatgttgactctacaacattattaaccaactttttttggttgactataatcccctgttcaattaaaaaatctagttgttgaactaacattttcttactacagtctggtatagctctttgtagctctccaaatcgtttcttatcttcttgtattttccatataattatagccacccattttttacctaaaatatttgataaagcttctactggacaattatatatcatatcatctatgttgtacattttattctcctcttttctttatttaatttattaaacaaacttttatagcaatatatttattaatattataaatatacctagctttatttaattaaaatttttattatatatactcctattacaaactattttagattttatgtaattaatatatcagttttgtaaatacataacaattggtaacttttttgtaactacatcaaccctattaatatacaatctttaactcattttattaacattttattattttaaattatatataaaatcactctaatataataattctttatttaaactgcttatcctgttaaactaattattctacttcaataaattctatattaaatactaaattcatatttaaatactaaaactattcattaatatttacccaaatttatacaaattaaaaagtctggcagattaatatctgtcagactttaaacaataaacttacttttacacttataaatccaataatattgaaataacgtcaaaaggtgctatttcatatacctgttcttcttctacatcttctattgcatttacaattttcccatttctatttttaaatatttgctcatccaatatcattctattactacttggattttccactcttattataaatttatctttactgtaataagaaggataacatgctgatataagatatttttctggtaaagatattatttctaattctctacttacagttttattgacaattgatttttgaatcttattatctatacgatataaaaagaaattgtaatcctgtaattgataatttacacattcccttagataattgtgggttaaattcgcaatttccaattcatcaaatgatttagaatccatatatattgcaaatgaaaattctaatttcttaagcatttgagctttatctgttttaattcttatatgaccttttttagttgtatcaccagaagcacgtcctggtctatataataaatcaggctttcctagttcatctgtagtagcaagtaaggtcaatgcaatttcatcttcaatatgttgatactcttttattcctctagtaaatacagtacagcttctattttggtttgttagagtaatattactttccaaaggttctaaatctataggcatttcactgtaaatatcttcccagttgtctaaaactccattttctcttgttatatatccaaatggcaatgatgctatgtttttattatcttttatatcagtttttatatgaacacgtagtctatgattatatatcgtgttatcaacacaaagttttacatccatcaatggattttctttggataagacaatacttacttttacatttaatttcccattaagatatttgttttttctatcttctaatgtaagtggtagtaaagtagtacctttaaccaccaacttttcatatcctaaagttttttctgtatacactctatcaaatgaaagttttatatcctcgtcattttttaatggagaaaagtcataggtatcgcctgcattaccactatcttttaatattaaaaagtttgatatgtaagttccatctttaagttgtaaatttaagcttccatcttcatagattatcttataattatcattagatataaaagtgtcattagatttatcaagtgataccatttctttatcacttgattcaaaactaacaactttataaccaagtgcaggaagctgtacatttattcttacttttaatatataatatcctgattcttcaataaatacgttgccagcaggtgtttcttctaatacattttctctcggttttacataagtttcttcaattatagtagcatctaaattatctttaaaataaatatttttactatcacttacaacttgtatctctttatatccattaaaacgcttagcttctgtattaaatactaaaatatcatttttagataatttaagcccttctgaaatcttttttacaatagtattttcaatactgtcacatatttcatttgcttctcttatacggtgaagaatataatctgttacagtatcagttacacatccagctagactatcgtgtgcttgtccttccaaaagttttttccatgtatttataagtaactgattgcttatttcaattttactctttttagcaattactaataatggctctattcttttaatcagcttgttttctagtttatcacatgctaattttatatccattctactagaaccaattgatttatgtattcttgctaatacaggttctctaaattcacctctatagctttctagtgattctatggactttatatattttaaaaactcttgatatgaactcgttatatatgaatactttccgatatcattaatcgctttaattttatttttgaaatcacctattatatttaactggtcattcccagaaggtattaacacctcatctacatcagtatatgatttaataaaatcaatagctgggtctaagcgtccattaacatactttaatgaaggctctaaaagcataccagttccatatccatgtggcatatttactgcatatatataactttctccatttaagcttttccacttaaaatatggtgattgaacatgtttaccaagatgtatacctctccaaaagaatatattatcaagacctacatgctttaatagtataggcatctgtgcattaaatccaaatgtatctggcaaatacccaattttcatatacttaccatactttttactttcaaaaattccaatcattaagtttcttaaaatagactctcctctagcaaagaatgcatcagtttgagtaaaccatggtccaatatgtagtctatcttcttttattaactttttaatgatttctattttttctttgtgtaattgtacataatcatccaaaatagaaagttgtccatcaagtacaaaacttacatctggattacgttctaattcatcaattacatctgtaaatagttgttcactaagtactaatgcatctccagaagtaaaataccattctctatcccagtgtgtatgattaacaatatgtgcttttatcatttattctcctctgttctttatcttttatatttaagtctaaactgaatatttaacactttatttagtataagattcatattgaatatagcttataacacgtcttaaatagttattaaattttaagattcccactctgcttcatcaaaatcatcatcttcaaattcatcatcctcaatcactggatttccacgcaatactataactaatccagctacaattactgttccaactgctattgataacacatacattggccaattctctactgtaaaccatccataaaatccactaattggagttgcatttactgaacctaaaccaactgccatagctgaagcaattgctgttccaattacacatgaaggtattacttttaatggagattctaccgcaaaaggaattgctccttcacttactccaattaaacccattataagagatgatttcccagcttcacgtaactgtttattatatttttgttttgctagtatagtagcaagtcccaatcctagtggtggtataactattcctaccattgcagcagtattaggtgcataaattccacttgttaataatgcaagtgatgttgttaaagctgctttattaactggtccacctaagtcaactgccatcatagcccctataatagctgccattaatatctgatttgtaccagataatccatttaaccaattttctaatccagtatttaatgtggcaaaaggtatacctatcacataattgattaatacaacagtgattaatgttccaaatactggtactataaatattggtactattgaagctgctgattttggtaatttaacatgatttttaataaacaaacatgtatatcctgctataagaccaactgccaaagctcctaaaaatcctgcacctatatctttagcaatcatacctccaacaagacctggtacaatagctaatttatcagctatagaaaatcctataaatgcagcaattacaggaaacattaatcctaatgcagtacctccaaatccatctagatcatgtaataatctaacaatactactagcactttctgcgtatttagcatcccatatatctggtatattatagaaagaaccacctacacgagatattgccattatcatagcacctgcaattactaatggaatcatatatgagattccagttaagacatgcttttttaactcagagactatctttttcaacattacatttccctccatttatttagtgtcaattaactttaatgcatcatttattactttctctgcatcctttataggtgcattaactggtacttctagtatttcttttccctcaaaacgttcagcatttctgactttagtatctactgcaaatattactacttctgcaatttgtgcatcctttgtagttaactcattatcgattcctgtagctccttgtgtttcaacttttataaggtgacccatcttttttgaagctttctttaacgcttgagctgccatatatgtatgtgcaactcctgttgcacatgctgtaactgctataatttttcttttcatttctacatctctccttcttcactaaatatattgattatttcttgttctgaattggctaattttagtgcatctacattgtcatcatccataagtttagttgctaatttagataatagtacaagatgattgctatccttatcaatattgcttatagccaataagaaaatactatctactggtttttcatctaaagcatcccactcaatcttatgcttagtctttgcaaatattatagaagattttttgacagcatcactttttccatgaggaatagcaataccattaccaatacctgtagttgaatgttcttctctttccaaaacagacttaacatattcttcttcattgtccacaatcccattttcaacaaatatactacttaatttttttattgtttcttcctttgtatttgtatcaagattaaaaacaatttgctcttttttcaatacatctgatattttcactatatactctcctccaatagcaaatcgtacacttcctttgtggaagttgcacttaatatgtcatttatattttttttattgtcaataaagtcataaaaaacttcatatatttcatcaagctctaggtttttgtcattttctaatgaaataaagaaaataacttccaccttttcatttccccatgtaataggattttttaacgttgcaacagatatattagattttttaatataactaggattagcatgaggtgtagctattgactgaaaagacgtgtaagataaattttctctctcaattgcacttttagctataccttcttttacaaaacctttttttattaggttatctgttatatacttaattgcatcttcatagtttgaagcttcaatatttaacaatatattttcttcaaagattaggtttctgaaagatttatacttcttagaagtacaacatgaaacattttgtatatttctttccaaggttcttatatcactttcatttaaaatagggctaactactatggttggaattgtttctaactctaaataaatagtacttattactaaatctgcatcaattttactggatactaattcttgtacggaaagtactttttcaatctttatcattggaaagtatttttttattcttgcagacaataacctagatgaacctaatcctgtactgcatactagaattactctaatattttgtggaagttctttcattctttctctaaaagcttcaaaatgtaatgctatataagcacattcatcatcatttattctaatatcatatataaattcaattactttctttaaatctaaagcttgctcaaatgataaagaaaagttttgtttgattgtatttacatatgggtttttaatactaagtccatatttcagtctatttattgatgaatgtacatgtgaagtcaatccatcaattaaatccttgtcataagctgtctcatacaatgtattttttataatttcccgaagatttgatatattatttgtacttgtttcacaaggattagttgaagtattttttagttcattagtatctctatgttggtcagccgctactaaatgtaaatttatatatccaatttcagattttggtaataatattgaaaatttttcttctaattgttttgctaaataattggtatttgacatttgattattttctatattaccaatatacaaactttcttctatatattcgccttttctaattctctctacagctattgccaaatgaataactaatgactgaaattcataatcagagaactcaaattttctttctctgctgaaattcctaagaatatcaataattattgataaatcatcttccgaaaaaataccatttacatctgcctgtatcttttcaaatgcttgataaaagctttcttgctcttgcttaatataccagtttctactccaaaatttatgtataaacttagcagtaagttgtcttttatctctttcacttatatttaactttattcccttactaggtttcttatatatggaaatcccttcgttttttagcagtttttcaacttctgataaatccctttcaatagttccacgacttatatatagttcatcagaaagttgttgtatagtaatataatcattactctttaaaagtactgaatatatatagataactctctcctctctggttgtaggaatttgacttcctttattatctaggtaaggaagtattttttttaaatctccatcaatataaacacctatcttaggttttcttattaaagaaagacctatctttttaagcactgcttctacttctttaagagattttgaaactgttttttctgaaacatctaaatcatctgctattgcttttacagttgtatgaccttcttttaataaaaactttattattttaatttcacgattttgaatcatatcagttaacattttcaattttactccttccctttatctttattttaatggaaaatgtttttctaaaaaactactaatatttcctgattaaatacggtaatttttatgtattgaacactttaattttagatgataaattaaaagctgtctaaatttaatatgaaaggaaatagtttaatgctgacaataattattgctttacttcctgtaatgggatggggattgatgcccatagttgcaaatctaaagaaaagttctcctcatgaacagcttttaggtacatccataagtgcgtttatattttccactataataactctggttatacatcctgaaattacatttttttcattttgtataagtatgatttctggcatattctggagtttgggacaattaatgcagtttaaagcaattcaaattgctagtgtatctaaagtaatgccaatttcaaatggttcacaattaacttttacgacattattagctgtaatcttgtttaatgaatggaccagttctaaaatgttactgattggttctttatcaatattatgtataatacttggtatacttctcactaattatcaaactaaaaaatctacagataaaaatatgttaaaatgtgttggagttgtattattatcatctctatttttatcattatatgttgtaactaatcaaatatttttaattgaaggatatagaattatattacctcaatctgttggtatgttgataacttcatctattattgtcaagtatttttctaaagagattgtatatagggaaaatgttttattcaatttaattactggtatattgtggtcaatagcaaatttaggtatgttcataacgactaatacattgggagttacaataagtttttctatctctcagagttgtgtgatagtagccactttaggagggattatattttttaaagaaaagaagaacaaaaaagaatggcttgctatttttattggtataatactaatcatgtctggtgtctttatgttgagtattataaaataggtatttatttacactaatcatatatagttttgtacatataaattaactgtttctatttatttaaataaatttgcttatatacttaaaataatagcatatgtatttatgaaattaaaccacactctaaatataagtatatttcattaaatacatatgctataaatttttctatcaatacgagaatatcaagtatcttatactataagtaaatttaactttataaattcaccaactaatattacactatttgatattaagtttttcatcttctataagcttatctgcaacccactctgtaacttgacctgttattttaatacagtgctcttttctttcgggagacataaagttatcaccatcccatttctttgtaatagctctacaacatgttgcaccatactcttttttaatataatcatgcaaacctttagcatgctcaaacatctttggattcatagtttctccatgtactcttccatatactatacctaaagccatctctcctccagatatcgctccacaaaggcattgagcttttccaagtcctatcggaaatcctgatgctaatttagttatctctggacttaaaggttggcctaaagcatcatttattgtctgaagaactgcttcagagcaaaaaaactctccttttctaaagtattcttctgatatgtttctaacttcttttaaatattcttcttttgttttcatttgttttcctccaataaaattaagctaaattaagtttctatggtttatcttatcttcatatatttatatcaatattcctattaaatacacatatttaataattcttatttagctttagatgtagtttcagatttactaagatatataataaataaaactaaaacatataaaataatcactgtagcaattatctcttctaacttagaagcatatgaaatccaacttataaaatgacctgatttagttaaataaccattcattagtttcatacccattgcacttattgccatagggaatgtaaatgcagcaaaactcggataaaaaggcaatcttaataatttcggtaagtatcccaaaactataatataaaatacaattgataatatgaataacaagtataatactacattatttttatctgaaaaagaattaatatatccagacaataatagtgaccctggtgcagctaatatagctatacttggtaaagatggttcaggcatttccttgattatccatactctctttaaaattactggtataagaactatataagatacaaatcctatccaaaaagcaattttgccaatcaaaagttgattaaatgctggtgccgtaacactagctgcaactatcccaacatatactatataccaagatggaaataccgtttttattgagaatttaactaagaacttcttactaaataaaactattaacacaagatgacccacaattcctatgctccaaatcataatacttaattctaaagataatggttttatatatgtagcaaatatcattgttgccattgttatagttggaaatgtacttgatattaaagggttctctaattgctctttaacaccctttctaagtaatattattttgactatataaattgcatacaaaataaatcctataaatccaattacattacgtaatgattcactataagattgtaataagttacctaaagtaaaaattgacaaaatcaaacttgcaataggtataggatatttttttaataaattcaagttctgcctcctttgttactaaattatttgtgttttaattatatcaaaaagatggtcaaattgacatattatgaccatctttcttatatagaaaatatctattaagtttaattttgttatcaaaagtatctatattcttgatatattaaggtaattagtatatttattttaatcaaatatactaatttgtttattcttatctactttaatagtcttcatatctctaatgcttatttttgcatcatctcttaaagtatctatgagtaatttattatcttctttataaagcctacagttttcttctacttttgcataattaaagttagcataacaatacagacaataatgtctgcaagtattgtattgtcctatatcgacacttttaacacatccacaaatatctctttgtgtactatctttttttacctctacttcacatcctataatttttgatattaatctatcatcaatacacttactttttccaatcccaaatttacttaaattatattcttcagaacacatttcaagtattatcccatgcttatgagcaatcttagaaatttcttttgataatgtttctatttctgtaatttctattggctttatatgtaatgctttagtattaaattttgttttcttatataaatcgataaaacttattatacatttttctgtaaatccatcaagctgattacataaactcgcaaatgctttgatatgataatctactgtgtacttttcacttaagaaaatcgggtcgtatcttaaaattactctttctttgcctatttttctagacaattccttaaatgaatctattacctttcttttatctaaaatacatgtctctacttcttttccatatgatgttatagtatagtgaaaataatatttatagtcttttaatttatttaaatcatataacattggagttacatcctttgtccaaaatacaaaacaatcaacagtatgtggatttaactctatcttactaacctgttttggattcattggattaattacataaacaaaaccttctttaagtctgttaaaaaaccacttactatagaaagcaggtatatcagttcttctactcacacttactatcatatttaacctccatagtaatataattatgtcctaatatatttttaatataattatagctctaaatacttaatttaatcaaaacatttaagataattccagtatgatttactgattcatttctagcatttaaaatatccttaataaggttataattctttaaaaataaatatacattattcctaaactttcaaaactaattttataatgaaactaaaaaaggtgctattttcaagcaccctacaattttactttttaacaaatttaatactatacaaatataccaatattacattaaaggtaaacactatatattaaaactttatatcattatataatacaaattttattttatttggtttgttttatctggttcatgatgtttataataatataccgtttcttttccaattacttcagaaccaagcttctcccattttcctccatagctagtctctatttgttcacattctgaatctgttgatgctacaataagaccataattaggtctgaatatagctgtttcttcctttccatttttataacttaatttaccattatttaaccttaacaggtttccattcttttgataattaaaattaattccattaataacttctggactagatgaatcaataaatatataattgttaaagttattttttaacattaaattacctcctccatgtaccgatttaacgatataatcataggcatctatattgcatctcaatgttaattttggtatttgaagggttttaaatacataaactttatgtttatattctaagccatcatcccagttatccttattatcactaactaaatcaatattacattctgtaaaataatttccataaaataaagaatatgcttcttctactctatctttaatacttaaatatgtgtcataatctgtattataataatactgcccacatcttcttataataccagaaaaataactacctttcactgagtcaaataaaaaaccacaatacccacattggtcaatcgtaatattattaattttataacttccatatccctcataatccttaacttgactacttataagaccaactttctgtattttttcaattcttacattatttatgctagttccagttctaatcctcattccattttgacacttagatattctactattagaaataattgtgtctattcctgtatcaatacccaacccacaagatgaaactgtaatatcatttacaattgagtaatatggtatcctaattcctgtacccgaaaaaccacttatataaatattttcataatgacctagacctttaatcatattcttactattatcatacagaattgctgatacattattcatctcaacatttttttcattcttattaataatcatctcataatgatatttaggattaccttttgtcggtggttcttcatttacctgtatctcacaactatcagaatagaaatttatatttttaatacattgtttcttccctgtcaatgtaataatactcatattttctactccacgagttataaattgtgtagtctctgtaggtgaattagaatcaccttgtaatacaatttctttattaattttaacaccacttgtaaataagtattttccttttggaaaatataagacacagaaatctgtttctatttcatcaataatatcctgtaaatcaggacctatgttgtacgaaccatcatttttaatacctctttctactacattaatccatcttccatctttaatcccagttcttccttccataatattatatattcctttcccatttacttaatttgaacctaccatgactaaagtcacaggtttactacttcatagaattttacataatcaaattaattttttatattatttttatattattcaatccatgctattaccaaaccatttacattaaaactatagtcctagctctccaataaaatacatctattcaaatactacgtatttacttatttctctatcaatttataatagtgtacagttattccaaactctattttttcaccaattttcccccatgttcccccataatgagcggaaagtatattttcatctttaataattgttgacataatgtcacctacctctggtttatgcatcttaataaccttatccttactatttatatatatatttcctttttttatcttgactttatccccataatcttcatcagatataccaattccattgatactacttagttttccatcgtaaaatataacagtttgtcgcatattattgtacgttaaatttcctttttctgacttaacaatccagtcagtagcatctatattgcatgttaatagtacattcttggtttcaagtgcttctacaagatacaccttatgcttatcctctttgaaatcttcccaattatctttattggtatttgacaaaactatattacttgactccaataaattaccatagaataaagaatatgcttctttaactctattatccaacattaaataattatcatagcttacatcataatagtactgtccgcaccttgtgatatttcctgatatctgaacattggatatagaatcaaaccaaactccacaatatccacattggtcaattgtgatatttgtaataaaatttaaacctctaccaatatttttaattccaactttttttatttcttctaccctcataccatttataaaagttccagtagaaattatcattccatcaacacagccccaaaccttactgttagcaatcgttgaattttcccctgtactaattccaagtccggatgtaaaaactgtaatatcatttgctgtagaattattaggcatatcaagtgcaattccagaaaaaccactaaaaaacaagttttcataatgacctggttctccctgtttatcttcacatacaatagccgatatatttctataatttataattacattatgatgaaatctaggttttccatctgttggaggttcatgattagatgtcatatctctatcacaactatctgaataaaagcaaatgctcttaatacagtgtcttacactttttgctgttataattgctatattttcacttttaggatttttctttcctttaaaagtaaattgtgttactccagcagtgtttttaggaacattcgccaaaatataagaatctccacataaggttaatcgtttcttaatcttaacaccactttcaaataagtattttccttttggaaaatatataatagaatcttctggtgcagcatctataatctcttgcaacttggaacttacatcttttgtttcatcattacaaatcccataatcaagtacattaatccagccacttatatctttaattattatagactcttccattaatcactacctcctagtttgataatttaatcttttatctttttataatagtacatagattccccagctaatacttttacatcaatctgttcccatattccaccatgtaatttatttatttcttctatagaatctagtactgaatatattacagtattcttttttaatctaggaaccattaagtacttacctttatcatctatatacagagtgttctcgattattttgattaaatctttttcatctatatcagaaatttgaacacctcctacagaacaaatctcaccattataaaatttataagtattttcaccattttctagcaacaagttgccctttgcgcactgtataagctcatctgcttcagcataacatgttaacattactttgtttgtttcatttgccttgattacatatatcttatgttcatcaagtgaatcattttctaaggtatcaatattactattcatcaatacaatattgcaattttctaaaatatctccataaaaaatggaataagcttcttcttttctatcttccatattctcataagtattataatcaacacttttataatactgaccgcatttagtaattctggcagttatctggctataacacattttttcaaacataaatccacaatatccacattggtcgaccataagattcataatcaggttaaaaccaaatcctttattattaatacctatttctcttatttcttctattctcacattatttaagctaacaccagtagtaatctccattccatttttacattcataaatcttgctactagaaagcattgacttctctccaagcctcataccaagaccacatgaactaacaatgatatcattgccagttgaatagtatggaatttcaatccctattcctgaaaatccagaaataaacaggtgttcaaagtgaaatagtccttgtgtttctccatattctgtaatagcagatacatttttaggtggtattttctctatatcatgactatcataataaaaattaatatttttgatacattgacttgttccttccaatgtaataatacttatattagaaactcctcgggttataaaattggttgttcctacgattgattgttttttatctaaatttgatacttgattatctcctccataataagaatctccttgaagtgttatttgttgactaattttaatacctttctcaaataagtaattaccttttggaaaatatataatggaaccttctagtgacttatcagagacaatatcttgtatcatattacttacatcatatttccaagtaatatctattttactgtttaattctagtacattaatccaatctggagttttagtttcaatttccatgattaattcctcccttttaaatctaaattcttttcacagaaaaaattttttgactataaccgaagtgacttttactctttttgggaattttgagatgacaattttcattttacaacatcattacagttatattataaatcaattataatctcattatatttttactattagcaagttattcttaattttttaatacaaattttatataatgattaaaatagttaagctttgtatcaatataatttaatcccaatagaaaaacactcatttctgagtgttctatacaaatttttattttgagaaatcttatataatcttacattttaaaaattttataatattcaatttaataccttctctagtaaagttatttttgatttgcatatcttaatgaccatgggcaactcatcatacacctcaatgcacaaaaacactttgaaacatcaataatagattctctttttccaggtaaagtccattcatttccatgtatagcttttgcaggacagttctctacacaaacattacaatttaaacattttgaatcaatcaaaggatatctttcaacagaaattggagcatctgtaagtactgtacacatgctaaaagcacatccgtattcctctgttacaaacaaattattttttcccataaatccaatgccactaatatttgctattgtcttatgtggtaaaggactaatccctgattgcatttctggattaatataggctttttcaaaatatccatgttctagattgtttttctccgattgagaatacgctctatatcctttattttgaatatattttgaaatccagtcagctaattcttctactttctcctctttttccaaaaactcatcactatctgtaggtaagttattgtatatatctgtaataaatttttttgataaccctatacaaaataaaattgctttagaaaaaccttgtgtttgatttattggaaattcagatatatcaacaaagcgaacaatgtctacacctttattgtataaaatagattttaattcatcattcatatttaactcctcccccctagataaaaataacattacacattagtaaaatttattattttaattatgttaaccaatactttgtacattctttatttctactcataaagccatactcaattaaatatcttctaattgttgcaaaatcatcatatatagattctaaaatctgattaacttccttttctgaatatttcttcccacgttcaaattgttccaaaatcttagataaaattacgacctttttcttttcttttgaagaaaatacttttaattttaaaggattcatactttcaaatgatgtatccaaaatgtgttttctctcttcttcagttactacatatctttcatctaccattcgagcatgttcatggattggtattatagtactacttttattagatttatcttcaaatacagattcatatagtgctaaatagagcttagcctgttttgctttttctctgaaaataaatttttgatggcgtatagtagatgtggatactccaacctgttttgctatctccttatctggtaaatcactaataaataattgaaataattgtttttgattttcagtcaatgtgttgtactttgaatcactattaagcaattgctctaaataatcactatgttctaattccatatgaagttcaatagcttttgaagcttcaaagaatctattacctattttatatatttctcctacctcatatgtttttgtacatttaatgcaactataacaatttaaatcatcattaaatatatagcctcgtttaatatcatcaatagaaagattttcaattttcatgttactacctccatttcacaatttacatttttcataaatatattatattaaagtttattaatataatcaacatttttattttttgtttatcaattctaattatttattaatttgaaattacaaaatataaaaatatatttaaacaaaactatttagatttttagctatataaatacttatttattctatttattactaagtgtttttctatataaatctaaacaatatttacaaaataaaaaaactccttaatttataattaaagagttcttttttatacaataaatccatacaatcaatcttataaaacataagtttataggtatttataaatattaaccttgtattttaattctttatttaaactcaattacagtatctttcccaccttcaacgctattgcctacattacatgtattcatattgtactctgaatgattagttattgtaactggagtaataagtgatataccctttaattcaatcaaaggacggttaattttcaacattggtgttccttccttcacttgttctcccatactcaccaatgcctcaaaaccttcgccttttaaatttacagtatctaaaccaacatgaataagaagttccatcccattttctaattctattacaaatgcatgtttagtctctgctactactactatctttccattgattggagcatatacaatgtctcctgtagaatctatagctacaccctctcccataattttttgagaaaatacaccatcttgtattttagataactctattacttttcctgatatgggtgattttattgatttttttttaaacattttgaacataaaaactactctcctttttgcttttatccattgttagctgtttttaacttctcacctaaacttcctcctggatggtacttataaaaatctgaagaaccaaaattactactcttagataatgcacatgcaatagaatctcctaaaaccaaagtaattgtagatgatgttgttggtgctagatttaaatggtctgcttcatcctttgcaggatatattaaagcataatcacactcttttgccagtactgaatttctgtttgaagtaaatgcaattgtcttagaacctattgctttaatatattttatacagtttaccacttccatagaatttccactatttgatattaaaattgtaatatccttactttcaatcattcctaaatctccatgcactgcctctgttgcatgtacaaaaaagctaggtgtaccagtactagcaaatgtagctgccaatttcttacctatatgtgcagattttcctacacccataaaaattactttgccttcacaatttgcaatttcactaactatactttcatattctattcctgcttcatctattaaacatcttatggcattcatttcagtagtcataacatcaaccattgtttttaaatatcccataactatctcccttcctactataaagttctttttgcaatataatccatagtttttttaatcctatttaaaccatcttcaagtttttctcttgaacatgccacatttaaccttaaataaaactcaccttcttcaccatatacagaccccgacataatagcaacttctccaatatccatcaataatttttggaatttctcaccacttattttaagttcggaaaaatctatccaagcaaagtaacagccttctggcatgaccaatttcaatggttctaaattatcttttatataatcaatcgtatatttaagattctctttaaggtattttaatagttcatctaaccaatattcgcagtcatcataacagaccattgtagctaatattgctagaattgctggcgaatttacaaaatcacggtatctagtgatattttcaaatttatttctaataccttcatttggtataatcacatatgacccagtcaatgctggtatattgaaagatttagacgctgatgtacaaatgaatacagaatctaaatagtcctttgcaacatttaagataggtgtcattctattgtcatatacaatatccatgtgtatatcatctgatattatcttgacatcattattcttacaaattcctatcatcttaacaagttctaactcactccatactctaccagttggattgtgaggattacataaaataaatatcttagattttttacactttttctcaaaatcattaaaatcaattgaatagaatccattcctatttacaagatgtgactttataatattacgattgttatttgttatcacatcataaaaagcattgtatgcaggagtatttataaggattccatctccttcattacttaacatctcaataagtttgctaattgaatacattacacttggactataatatatccagttactatcaacgctacaattaaatcttttaatataccaattcgtaactgaatttctaaaatcatcatgtttccatctactgtatcccaaaactctatgatttaacctttcctgcaacacctctgttatttcaaatggaaactctaaatccatatctgaaattgtaaaaggaagcaaatccttcttaccaaatctatcttctacatagtcccactgggtacaatatgtacccaatcggtctacttttttatcaaaattaatcattacatgcctccaaatgaccttccatagctttatccatctgctttcttaaagaatacacttgagttcctataattacttgtattgtatgctcatccaatttaacaactgctataccaccagcctctttaattgcatcctcatttattaatgatacatcttgtagttttaaacgcaatctagttacacaattatctagtgataatatattagattgaccacctaaagcagatatcatttgttgtcctttatatgtagacaaatttttgaaatctgaaccatttccttcagatacttttatttctttatcctcacgtcctggggtctttatattaaacttaataattgcccacttaaatacaaaatagtatattgcaaaatataaaactgctactaatactgctattggccatcctgtagctgttcctcttaacacaccaaaacttataaatgcaattaaatctcctgtgaatcccatcaacacgcctaagtatggaagtaccatgtttgctagaccattcataaatgtatggaaagcaaataatgctggtgatatgaataagaatagaaactctattggttcacttataccacctataataactgtcaacactcctgatattaaaagtcctttaagtgcctttctattttctggttttgctgtacggtagatagccaatgcagcaccagctaatccatattgaatcatcaatttaccttgttccattttaccagctaaatcaagaggtataatctgattattttctacatatgccataaacatgttcaatgtaccaaagtacgtttctccatcaataacagcagttccacctattggtgtaaaacggaatacagatgttacaagatgatttagtccaaatggaattgtaactctttctgccactgcatatgaaaaatatcctaatggtcctgctgaagaaatccatcttcctaaactttggaatgcattgaaaaatggtggccaaacaataggtattaataatccaactatactcataactattaaactaacaattggaactaatcttggtccactgtagaatcctaatgattctggtatctttaaattactaactttatcatatattgcataaacaattaatcctgctacaataccacctaaaacacttgtattatatgtttgtatacccataatcatagcttgaccattagttgacatctgttctgctggtactaacaaatcagctcttgttaaataaaaatttgtacctatatgcattgctataaatcctactaatcctgaaaaagcaccaaactctttttctttttttaataatcctagtggaattgccattgcaaataatgctcccaagttgttaaatgcaaataatcctattgttaacatgaagtttaaaactaagttaacatattcattccctagaaatggaaccatttcaatcatcttagggtctgtaaaacctgccccaagtcctagcatcatcccagaaacactaagtagtgctattgggaacataaacgttttccctaacatttggaagaagttccataaacctaacttattttttttcataattttcccctcctatttttatctaaaaacataatcaaatttatagaaaaacctaaatcaaaaaacttaatttaataattaagtttaatgatttaggttttgcctgctcaaccagttacaatcctaaaagtcactgtctgtatttgattgtatctaataaaaaaacctaaatcaaaaaacttaacctaatagttaaattcaatgatttaggttttgcctgcttaaccagttacaatcctaaaagtcactgtctgtattttgattgtatctaataaaaaaacctaaatcaaaaaacttaatctaatagttaagctcattgacttaggttttgcctgctttatcagttacaatcctaacaaccactgtttgttattttatttatgtgaatcattaaatataattcttcttctttactaatcttatattcaaatctgtctaataccaatgctgcaatttcttcagtacacactttaggtttattgtaatttttattcactaacttatacatatcttcaatatcactatcattgtaagtttcttttcggagaatcctttgaacaaaaaactttaagtgagttataagtctagtataatttaatgaatttacatccaatttaaatccatgtacttcttcaattatctgaataacttgttttgaaaactctagtatattaataccttcatctttttgagaattttccaaaccattgattatgtgaatagcaatatatcctgcttcatcttcaggcaattttattcctatccttttttcaatttcatcaattgcccataatccaaatttaaattcttccctataaagttgttttgtctcattcaatattaagtttggtaattttataccttgtttttctctttggacagcaaattctatgtgactagttaaggctaatattattgaatcattcacttgagtatttaaaacttcattagccttttctataatttcttctgaaattttaaagtattcaatagaggtcttattaagtatttgattgtatttgtccctttgatcgtcttgaacaaaatatttcttagaaatcaaattttcatctatcaaatcgcctacttttttcttaaatcctactccagcaccagtgacaattatttctgtgccatcttctagggagcttactactacattgttattaaatatcttttttatattcactataaatcccctctaaaaaaattctctcatcacacttacatagtatagtatatttaatttaatgtcaatatttaaaattttactttcgtatatattttgcaatttaccctataatactacaataacaaaatattttttattgtcatcaattaatttgtcatattttatcatattttcattgaaatatatttaattatttcttatgtatatttaattatttaaaatcaatcgacattttatattacaaaaattattttcagttttttccagtattctcaagtattttaacttaattatatatatatttattgaaattcagattatagctttgtactaatcttttctcaaatatatacattggtaatataatttttaatttatataaattaaattaaatttttttataattttttttataaaattatttgtattatattttgtattttttataaaattattatacttgtacatcttttataacatataaaatctttttttctaattatatacaatatattttccattatgttctaatcaatttctttactatttttacaactttattagtcatattcataattatttctaattagtgtttaacattttatgtaaaatttataaaaaaatgtatataaattaaaataagtgactatactaaaaatatgatacggataaacaataagttcaacctatctcccccaaaatcaagtgagctacagtttcccccaactgtagctcattttcgtgtaatttaataaacatctcaacaagaattaattaacaaaaccccttataaaaacataacatatattaaacaagctcttgattaaaacttgagcttttttaataaaaaacagaatagtttattagataaggggtttttttatgcaattcatggatgtatctaaatacattgaaggtgcaaaccttaaagttaaaactaaaaatggtgaaactgttaaaagaatatattttaacaactctgccactccattagttttaaaaaacgtagtggataacttaaactgtgagattccttggcttacttatattaatgctccaggaataatctcagaaaaaaatactttaaaatatgaaaatgtacgctctactatcctcaaacttattgatggagacgaagaaaaggattctgctatttatgtcaaaaatgctacagaaggaataaacttcttagcaaaattttttaaagatgaaaatccagataaatttattattaccacagcaatggagcatatggctaattacctaccttttaaagttaattttcctacaaaagttgttggaattacagaaaaaggagaacttgatttatgtcaattagagaatatacttaaaaattatgctggtaatgtatctctcgttacagttacaggagctagtaatgtcacaggtataaccactcctatatatgaaatagcaagaatagctcataagtatggtgcaaagatattggtggatattgtgcaagtaattcagcataaacctttttcaatgatgccacatgaatgtgatgagcatatagattttgttgtttttagtgctcataaatgttattctccactaaatggaggagctctggtaggacctaaaaaattctttgaaaaatttaatcctgtactatatggctcaggttctaccaaatttgtaaatgataacaaaatactatatgcaaacgtaccccaacgttttgaagcaggatacccagagtattttggaactcttgcaatgggaaaagcactgaacactttaaataaaattggtctaaacagaatttcaaaatacgaaagagaattatttttatatgctaaagaagaaatgagtaaaatacctaatataataatatatggagataaatcaaataatgtaattatcccaaatatatcttttaatataagtaatatgtattacaaagatgtagcaaaatatttagttgataactttggaatagaaactggagctggagtagtaggtgcagatatttatgtacaaaaattattaggtataagtccaaaagaagcatacgtcagatttatgagggaaaatcctgtaggtcttgttaggataagcttaggaatgtacaatacttttgatgaggtggatagctttatacatgctattaaaactttggcttttaaataagctttttctattcttttttatcaataaatagagagtagttttgttttcacaaaaaaacaaattatatcaacagtcaatttcattagcaattagacactcatttgtaactatacaaactattttacactatacaaataaaaaactcattacaatgagtttttttgtttatatatgatatttattttaattacttcaatttactttaattacatatatgattcaattttgttttttaaattctccttaggcataaaacctattaatctatctacaggttttccatccttaaatattagcatagttggtactgtagatacttcaaatttctgagctaattctatactttggtctatatccaccttcaagaagtttgctttttcaaccatctcatttcctaaagcttcatatattggtgatagcatcttacaaggtccacaccaagtcgcaaagaaatctacaactactaaaccatctttattttctacttcatttataaattcattattatttattatttttaccataatatacatctcctttattatcttcttgatactaatatactacgccctatataacagttcaattaggcacttttttgtaaccgcctatttttaatagatttaatattatgataaatagatttataagattaaatatttataagactaaatatttctgatatattttatttttttcttaatatagttgacattttctcccttaaattataaaatcaaattaataactacataggtagttactaatcttttatcaaaggagtttctatatggataatataattaatgaattacaaaatataggatttactaaatacgaatctcaaatatacatatcattattaaaggaaagccctttaacaggatatgaaataagtaaattatcaggtgtaccacaatcaaaagtctatgaaaatataacaaagctattaaacaataatataattatcaatgttggaactgaccctattaagtacatacccataaaccctaatgaattattaaaaaataagaaaaaagaatttgataattctatggataatctaaagaatagcttacagatattaaataaaaataaaagtgtagaatacgttttaaacataaaaggagataaaaatatattaaaaaaagcattagaaatgataaaaaatgcaaaacaagaaattataatttcttgcccttatgaagaaattcttgaattaaaaaaagaactcctaattgcttacaaaaaaaatattaatattgaaatactacttttagaaaacaaaagtctgaaaggtcttgataatattcatactcatggaggtaataaaactacacttgaaaataaaatgctttacaaaggaattattttgattgtagataatgatgaaatattgacaggaaacttatcagaaggcagtgaggccatttcaatttggacaaaaaactctaacattttatatattggagttcaatacataaaacatgaaatttatatttcagaacaaataaaaggaggttataaaaatgaacaaaattaagattaaacaagttgatgcttttacaactataccttttggtggaaatcctgctggtgtcgttactgatgcctctaacatttctgatgaaattaagcagaatgtggctaaagaaatgaatttatcagaaactgcatttgtttcagagtcaaatgttgcagattttaaggtacaatttttcacaccaggtttagaagttgatttatgtggtcatgcaacaataggtactttccatgcacttttggaagaaggaaggcttaatactaataagagtatattttatcaagaaacaaaagctggtgtattatctgtagagcttaaggaaataaataatgaaaatatatttatgatggaacagaatacacctgaatttgaaaatttagataattacagaaaagaacttgcacaaatgataggtgtgcatgaagatagacttcttgaatatcctattataaaggtaaatactggactttggtggcttgtatttggtctaaaatctttagatgatttaaaaaatatctctccagatttaaataaaatcaaaaaatttagtggtgataataatataattggtataactccattttgtatagaaactatagataaaaagtgtgactaccatttaagatctatagcaccatatgttggagttacagaagaccctgtatgtggaactgggaacgcttgcgtatcatcttatatagtacatcacaatattttagataaaactagttttattggtgagcaaggtaactttataaacagacctggaaaggtatatgtaaatataactagagaaaacaatgacataacttctgtaaaaattggaggaagtgcttatactgttttaagtggtgaaattatgtattaatcccatacctaataaaaacaaataaaaatactagctaactaaagctagtatttttatttgttatttttatttaataatcacactctaacaaatattataattatatatatcataatattgtatttagaagtaaaattttatttttattattaattagttataaatcaatctaatacaacataattacagtagattaatctataaaacataataattacttactgattatttatcatcctcaacaagtctacttaatgtcttatcagataagaataataatatcgctgcaacaaatagtattactggaattatagtatatactttaatcatatcaaatttaagagtaaatgcatatatatatccatatcctttaccagctataaaagtagcaaatgtccatactcccataagaacacctagaagcttcttaggtgcatacttacttacaaaagagttaccaagtggtgagaataacatttcaccaagacttaaaagaataccaaacatgattatccatagtatactagctttagcagtttcaggagctccaactcctcttgaaaattctgcaccaacaagcattaagaatgcaagacctaagaatattaatccaagacctgtctttttaaataaactcatatctccttgtggtctactagcaagtttaaaccataatgctccaagaactggtcctaatactatacatacaagtgaatttaatgagtcaaaccaagcaagaggaacatcaaatcctccaacattcatgtttacaaatgctgcaccataatcataaactgcaagataagttagataccagaatacccagaaaattacagagaagaatgatataagtataatagcccaaattctcttcttatccatgcttgtaagaggagacttatctttttcttcaactttttcagcaactacaccttctttaaaaggtctctttcctgcatttccaaggaatctccatccatatatgaaccatattgcacctattacacaaagtacagctgctataaagaaacattgagaaaatccaagtacaccattttttgcaaatgttttaaggtaaagaataccaactgctatagtaccaataaaagaacctatattaacaaaagaatattgtactgaaaatgctgtatcaagttcttcttgactatcaaaaagctgtccatttaccgcagatacgttacctttaaagaatgcagtaccaatcgaaactaagattatcattgcatttaccatagaaactgtagttgcaatagaaccaagatagtaacctacccccatgataagcatacctataggtatagtatatctagctcctatccatctatctgatatatatcccccaattataggtgcaaggtatgtgaatgcaacaaggttggcttgcattatagcagcttgtcctttatctattccaagaccaccatgaactatagctgttgtaaggaatatatatattaagtactttgaagcataatatgctgctctttcaaatgagaaagttgttgagcagatataaaatcccataggaaatttacccttcttttttactgttgagctcataattttaaatcctttcttaattgtatttttattttttacgttttgtccaaattctttcttttatgaaagatataatattattattttgtaaaacaatttgtaattattattaagataattgcgcatttatttgtagagtacatattctcatggaataaaattaatacacttcttaatcataaatttaaattatataaattcactattttcagatatagttataaattaatatattctcatctaataccatgaaaaaaccttcgccatatgcaattcttattttttacgtgatagtattttacaaactaaaatcccccttttgtagcaacttctgtaattacattttagtgcttttttaaaggagtctcgaataaagcaacatatattttgttcaaataatgtttttatttactttttaaatttatatattacttcactcaaccaattctcaacttaaataaataaactactatctattcacagattagacctatttcttacacattagtttataataaacactgtgaatctaaacataaaaactgttattttaaagtaattacccatatattcgctttgatactatttattgaggttatactctttatttataatatattatttataaaatacctcaaaatatattattaataaaatacctcaaactgaaaactttttcacgaatatttatttttcacctccccttttttattttaccatgtaaatcgtaccataaatatgcacttatatgcaagaaaaaaatctattaatcgacagtaaataattagaaaaatttaaattatatttgttaagtgtattatataaaatatttcctatgaaaatataaattaaattaatgttcagaatagtttttagatatgaaatcttgatttttttattactttacttatttgctcaaatatatttttgtatgcagtatataataatcaaattatacacttcttataactgcgttgatttgaaaataatattaatagttaatagaagaaaaaatttaaattaatttttaaaaaatctattaagttaattgaatacttttttatgtatttaattaattttataaattcaattattttctaaatttaggtatgctttactatataaaaatgattttttatcttaattttctaaatataagtgaatgctatcattttaagtatcttataagcaatgtaactatatatctctaataactacttttttaacatgcttaaactatttataagctattatatttatgtattaacctaataactttttcactaaaaaataacaatctattcaaagataaactatagtacttcttctactttgtttcaataaaatactaaataaatttcgtacatccacaatttttcaggctacactataaatatacaatatttatcttagttataagtttaagaatatttttagtcttattttgtcgaatatatttttaataaaacttcataattctaagcatatttttacactgtgttttcatgtacaaaaataatgcttacaaataaacaacataaataaaacttaaataagatggattctattcaacatagtatccatcttattcattcaaaacctaaaaggattttttataatattatatattttaaaatctaagtaactcattatagtatcaatttcacttaaagcttacaatacacttattaatcttgctttatattaaaaacatctacaataacaatttaaatctttaagtgatatccatctcacacctaaaggagtgggctctccgcactattctgtaattcttcaatacaatcattcttaattttttatataatttaattatatattttattttaccaaaaccagcatacataaataatacttaaaatagattaaataaaggatactaaaacactttattgaggtatatgacttgaaatatatgaactaacttcattaggagaaatatctaaaatagttgcaaattcttcacttaataacctttctgcttctttcattatattatcatctgcttgatgtgtttttttaccaatagattttacatactctctgttattatctatacttcttactaattttattaactcttcacatttaccacctctgagtatttttttaaattgctcacttcttaatttttcattatctatccatgatgtatccatattaggaatatcatttattaatgaaagcacattaattttagaaagtaactttctcattggtactttttcattatctacaggaatttttattactgtattattagaataaataggactcaatacataatactctttttttattccatttgtaaatcgttcatttgttatatccatgactttgcagactcctgtcataccatacattatataatcatcaatcttaaacaaaaacatcaccatccttaataaaaaaaatagttttgacaactaaatccatcttgccaaaactatctgctatatattatattttaacacattttaagacttaaatgtaagtaaaacttatattattaaaattaaaaaatacattaaccattgattaatgtattttttagatttttataacaagcatatcaaaataaattaatacagcttatctcctgtgaatacctataaaattggtgcttggctattcattgagtacccatcatttcttacatcatttatttctaatatttcatcatttgttttaaccttagtaagttttttaactgctccataaggttcttttaatgaaattttatctcctcttccagaaataacccataaaattttataccctctaggtattacttgtagtttattttcacctttaccatcagtaaagtagactaacaaattaatctttttattattagcatactcaaagactggagaaaatctagtacctccacctatcctaattctatcttttatatctttttcagttctcactttatatacacgtctaatttcattatcacattctataattgtaatttcatgattatagtttttcactatactaagaacttctttaatagcttgtttaaattcttcatcactaatacttccacttacatcaagtgcaactgctatttctgccttatgacttctaagttctcccctcaaatctaaacgatttggttgtcttctatttcttcttgttatagtcttctttttattattttcaactgttcccattattctattaagatataaattccatggcaattcacccttactatttttaagtgatgatatcatactttctaaataagcaggaactttacctttttgagaactgttaataaatttttcagtaaattctctaagggtatttttatctatctcattggattcatcccatatatcatgagttctttcggggctataatcaatttctacatctccatatttatcactatcatcttcctcaccatcttcatccacttccatcaaatctaattcagtctgaatcttttctacataatattcaaaaggttcatatggttcaagttttaaggaatattttaaatttacccactctaaggtagttgcatatggtggtaaattgtttagaaatttatttactactatatccattgccatattaattgccaatgtactatactttccttttaactcctttgctctcatcaaatgcatagataatatatgatgaatttcatgtttaattgtagtctccatttgctttatgtcaagcgttaaaaagattattggattaaaatatataacatatttagctcccttaaaattcacgcctgtaggactacttatatcaaatcttatttctcttgacatctgaaacaaaaaatatccataaaaattatcttcttcttccataagacttaaattcactttatctacaagactaaaaaactcatacttaaaatcttgtggtatatccatatcaaatttctcattagcacgatttgcctttagcatagaatgagtatttataatttcacttgctttattataaagctcttttgcttgtttatcaaaataattttccatacattatccccttattaagctataagattcaaaatatgattttacaaaaccttcattttctatggcttttttatatacttcaatataactgtttctaatatccttcataatacctatcattaaatctacaggatacatttttaaaaattcaataaatctattaatatagtggtttgattcatatttatcattcttaatatttaattctaagtcttttagaatgttcatagctgatagataaagtcttgtatgactctcattttttactctttctacaatgggctcatcaatagattctcttaaaaaaacatcttcataggatattaatggttcagagtttgattcaataaaacttataaattcttctgcaataactttacctacattaccctttacaacatttaaaaatactgctctaggaatagaattatttttttctttataaactttataaattttagatactctctcataacttctaggagtagctcttacatcatcttcatttattttatgcagatattctggaaaagtggaaataaactcgataacttttctttcaataccctcatctattgcccattttatccattgtgtatggtcactctccatatttaaccaaacaaacctattttcttgggctgcatccatatctaccacttgataatcaaaatctgaaccatatttacttgatggattcattgctgctaaaatctttacatcatcatgcagtttatatccattaatttctctatttaaaattaaattcataagttcttgctgtactgtatgctcacaacgatttatctcatctataaataaaagaactgtcttacttttagatatctcttcatcaatttctcttaatttgttatgaacagcatacactgttgttttcttttcagtcttatatccattagaattaactcctacataagattctatagttggaagaccacctatttcaccctctttaagtaagtttccatcaataacaattaaactccaatcattttctttggcaagcttatttgctaaagctgtttttcctattccactttcacctactattaaaggtacttctccagtggataatattaagtcaacgctttttaatgtgtctataaaattcatttttctctctcctacataatctttaatttctcatctacagctattttttttgctgtcttacttccatatttataaataaacataattttatctattggtatactttcgctatttctatctataacactacaattcaaaaaatctctaatatacttttcctcaacatcttctttggataatacttcttttaatacactctctaattcatctttagatacttttttcagaatgtacttaatcactaaaatattcacttttaaaaattccaacattttatttttatctaaatcagttataaagctaatagctgcttcattattttttatagctataagttctgcattataactaggtgaatctatatatctcaaggcatcataacttattcttactgcctcctcttgtacactttcataaggttgttttataaactttatcgaatcataattttttcttactgctaacagttgtaattcttcacttggatttttagcatatttaattgcccatcctgcttgatttatagccatttcaataactttatcagttgggtttttgatataatccagtatactccatccctcatttactgcttttatcatcatatcttctgttggattatctataaatttaattgctctaatattattatctattgctagttcttgcatctctctggttggattatttatatattctagtacaagcccattttctttaatagctaacaatttcatttcatcagttggattatctattgtagctataatattgggattattttttatcatttcaataactctcaatttttccataatgtgcctttctttctataattatttttatatctatattaattataataatctattcctatttatataattgtttcttattataattaatatactttttaatcaaatttaaacagaataattataccaatatataaaaaaatttctaaaaaacaataaaattaagttataaacaccaatatatttctattatttcaataagtatacaattagattagaatctaacgctagtaataaaaaattactttcccaaaatagatataagcctcattttatcgttcaaataatgaaaatatatttgatttcatgcaaaaagagtgcctaatgaactaaaaagttcattttgagacactcatttctttatataaatttatatagtttttaatcgttcgcattcaaccactcagttaagacttttatatatttctcattttcttcaacgaatggcatatgtcttgaatactcaaataactcccacttactattaggtattctatcatacatagtctttgcaatatatggcgaacataaatctattgctccactagttactagacaaggctcttttatttcatgtaatctatctgtaaattcatatccagaaagagttcctgtaggagaaaattcattttgtccccatcctacaatatatgcttcagaacctgattttttaggtcttctcaggcactctggagaatcttctgtcacttcacctgcacaatacatttccataaatctttctaatgcatcattatattctttattagagtaatctccagtatttactgcatcaagcaatgctttttggtcaacctcactcatatatgatattcttcttttttgttctttctcccaaagttttgcagaagaaagagtagatgaaaggatgtaagacttaataccttttggtttatattcaatagcataccaaatagcctgcatacctccccaagattgacctaacagatgaatttcatcaagtcctagatgttttcttagttcaataagctcctctatccaagtatctgcattaaataactcaggatgcccttctacaaaggaatttccacaaccaatttggtcatacattattacttgtctaccactttcagctatcttatccaatacctcaaaatagttgtgtgtagaacctggacctccatgaagtaatactaatggcttcttcccttccgtattttctcctactatacggtaatacgttttaaaacctttaaaaggcatatatccttcagtaattttcatatttatctcctccaatttgtaattataaacaataatcaagttcattaacaatactatttaaaacctctcatacgtatttaattatgtcttttaatctttatacctacttttataaatagtataacataaaagttaaaaatctctatactaaaccaattataaaattatattaactatataattttattttttaataatagtatatacatatttgattattttcatttgctatttaaaatcaattttaagttttcttcttataataaacttcctctttgtggtctcatgttagtctctaaatttaaaattttacaaaaaattttcataaaataaaattatattgattgtatctaaacaaatagggcaataaaataattaagtatagttacttacctttcaagcaatattagttttatgttagaattttattatattgatttacaggaggtttgcatttgaataatattaattcacttaaagtaataaaattatctcttggatgttctcttgctatattcattgcttggctattaaaattagaatattcaatggttgctggagttatagtactacttacagtaaaggacactaaaagagaaactcttaaaggctccattggaaagatttatggttttcttttatgtactattttttcatatttatgttttaatattttaggatataatttgacttcattttcaatatttatatttataattataccactttgttttttgttaaatattcaagatgttattgctatgtgtgtagtcatagcatcccattactaccttcaaggagaaacttctatcaaatggattttaaatgaagctggaatatttgcagtaggaactggaataggtgtcttaataaatatgtatattccaacaaatatacataaaatccatgaagttcaaaaaaagttacaggaagaagtgagtattgtacttatagacattgcagatattattgtaaatcctaaaaaagaaaatggatatagtagagatttatataaattaaattcacttattgacagcagtatttctgaaacttacgataatattaataatactttattaagtgatactagattcttcttagaacatatggatattataaaaagccaacgggatatcttagaaaatttgtatagttatgtatctcaactaaattctacaccaccacaagctcacattctatctgctttcatacataaaataggttatactgaatttgaagctgaaacaggcaatcttcttcttgaagaattgaagagattaatgcttagtatgaaaaaccatcctctacctgttgacagaacagagtttgaaaacagagctattttattcctatgcttgactgagttaaaacaatttttagttaatcgtaaacatgctcagatgcttagagataataatttttataaataaaaaggtgagaaatccagcagttgacctgactacaaaatatcagatataatattaaatgcgcccctagtaagagggcgcgatgtttataacttattctactgtcatgattaaatcattattcatatcgaatatacattatttgaccaagtccaatattagctttttcatcagtgatttctattttaatagtcacatcattttttttacagtactttgctaattctgcaccagaacgatttttaccactaaaatctaaagaaaatggcttatcatatttaaaaggatattcaacaggttcaccttctggtgctaatgcaaacatcccatatggtgtgttcataaatcctattacagcaattgtaagatttgatgggtctaaatttgatttactacctagaaatgtaactgtattcactgatgaattaattacaacacatctaacaccttcatacattacatgtttatcctttatatctccaaattttccaacaacctttgccccgtcttgatgtggtaacatagtgtgcttcccaggtagtgctggtttttgcgtttgtgctactgctccaactgttggatatgctgtcttatcaaatggtaatgggtggctaagactcttgtatatgatatcctttcctgctgatttattagcatcaatatctacatgatacaaacgcccatcaccaaaacgtataagattccactggtggtcatttgatgtgctgtgtacataataagattcaattcccatagcgtcacacaaagctttcatgctcctagccattcctgaacatgcaccttttttagtaaccaatgtataggcagtattcgctccttctactgcattccagtcaacatatgttgtgttatttttaatgtgattataggcaactaaaatcttagcgtctgtagtcatgttctttgtaattttattgttcataaaatctgctgttgcttgtgctactgagtttagttgggcttgtgacagctttggaccatatacgctattggttccagtgacatagctttttggtgtttttgctgttacctctttggctgtcataccataaactgtcatactcatacctgagactaaaacaattgttgtaatcaataacttggtagctaacttcctaattttcttcatacttagtattctcctttataaaatattgttacttcctattctctaccattaataaagttcatttgggatttaaaaaggtggattgtcaatatgtatgtttcttcatttatacgttcgtgaaatatttaaatttcatggaaaatctaatagatattttctagataatttgtatacaatacaactcgcaaatcagggtgtttgctgttagtttgagaaaatgatgatgattaatatattcggaatctttgacctataataaataccattgtcttcaatcattaataatggtaagagtaaagagaattatcaataatacagttaaaatcaactttgtatacatttcatacattctctcccaacaacattatacttcttataatttgtatattcaatacgttttctgggaaaatataggatatatctataaaaatataaaaaaggagttgaacttaaaatttgattaaaaaaaatcaattttaagacaactcatttgtattataaaaatgctatatattattattaagtaagtcaatattttagatatttatctatttcttattgacttacgcttatagtctaacttatttgtttagttgatatataacctagttttaagcattattaatatttaaataatcaagtatcctttttgtttcttgtagtttctgttctgcctcatttaagttttcttgaattatagaaatatatattatatctatcaacgtaagcattgctattcttgaagaaatagctccttctctaagccttttttctatatttggtactactagctttaaatcactaatcttactaagatgattgtcactatatttagttatacaaatgaccttacatccttttaattttgcattttctatagactttattacttcttttgattctccagagtaagatattgctatagctatatcttctttatctacatttgaagataccataagttgtgtatgactatctaaagaggtaaatgcctgtttatttatccttaaaagtttcatctgtaaatctagtgcaactaaagccgaaccacctactccaaatatatatacatttttagcctttattatctgttcaactgcttcttttattatatctttttcattcaacaaccttgtttggttgatagtctctatgtttttgtttgtaattttgtttataacactatctatattacaatcatagttttcatctacatatgtgtattcattttctttgcccatcaaatctttagctatctcaatttttaaatccccaaaacccgaatatcccatttttctagaaaacctaactatacttgctgtacttgtttttgagtttgacgccaattctgatacagaaagcttacttatagcctctgtattattaagtatgtaatcagctatttttttatctacttccgttaaatcttcaaatatctgttttaattttaaaatgcaactcatactctaccacctctacctatttactataatatttcttcttagcaagtaaacatgctcctaaatctggagtcaacactggtctcactataccaaatctcgttttattcaaatattttttaagtggctctaatattaaatctcctgacttaaacactccacctgaataagatacctttatctttgtaccttgttcaaaatgatgctctaatcctattataagcctacttaattcataagctgcatcatcaaatattttactagcagtattatcaccttcaataactgcttttaaacatatcgtagcaaactttgctatttctattctatctccttgtattccatcatttacatattttattatgtcataatcattctctatattaagatgtctttttattaaatcatataattttgtctttgaacaccttccatcagactgcattgtgaacatttttaaggtagccattcctatataatacgctgaaccttcatctcctaatacatagccccatcctccacatctgtgaagattcccatctttatctaaagcctgtgctattgaaccagtacctgcaattatatttatacctttttccccatttaaagaacctgctaatgctatttctacatcattacctagagtataatttatatgactatatgcattttttgttgctacttctaatgcatacaatacttcttttatttttccatatccagcaagtccaacaaatgcatacgttatttcttctacatttatcttagcatctttacaaacttcttccaacccagttattaataatttcgttagattatcaaatcctatttgattataatgacaagttcctttggttatggttcctactatatttaattcttcatctactaatgtaaatgttgttttcgttcctccaccatctacacctaaaaaatacatactatcctcctacaatatctttaataattctttcaatacttaatatctaaaaataaccttccaatgctgtttttttaatattgaaaggttatcagtactattatttattttacaatttttctattgattttaaagcttcacttatataaccttcttgtctatctaggatactctttgcactatccttatctaaaccactttttatcataaatatagccaatttaactctattatctgcttcttctaagaatttttctgcaacgtcatattttacatttgtagctatcattattattctttttgctctttcaaccaacttttcatttgatgtcttaacatctaccatcaagtttgagtatacttttcccatcttaaccatagaagctgttgttaacatattacataccattttttgagctgtaccacttttcattctagttgaacccattattacttctgcccctactataatgtttattggtaaatccgcttttttactcatttcactattcggattcatagttattgatagtactgcacaccccaattccttagcatactccattgcacctataacataaggagtccttcctgatgcagctataccacatataacatccttagatgtaactcctctatctattatatcttgctttccaagttctttatcatcttcagcaccttctattgctttaaatattgcttgatttccaccagctattatagcttgaacaagctcaaaatccactccgtaagttggaggacattctgtggcatctagtattcctatcctcccactggtacctgctcctatatagaataatctacctccctgcttcattctatctactattatattaacagcttttgctatactctccttttgttcttcaacagcataggctacagttttatcttcgttatttattaattctattatgcctaatgtatcttctttatctatttgcaatgtattcttatttctaccttctgtaactaaattttctaaagtttttattaacatatcatttcctcattttcttaatattaaatttttaaacacattttaactccaactttcataattatatttttataataaattaatattttcataataaattattttgttgagggtttaaaatcaaacttttgccatggtttaatataatctaatataaataattcttcttttcttatatatcctactacattcgatttaccactgtttttcatatcagtcaaggctatttgtaactcccctgcataatgaccatattcactactttcaattactatatctcctctttttattattttaggagtattaaatagttcaaatttgtatcctttatatttaacacgagattgagtagaccttatcagactgtcagatatatcccctctattaaaatgtatttcttcaaagagtatcttcttctcaacttctcgtatattttcctctattgctacatcaaatgtaaccatatcttttctcatagaacctaatacctttagctcctcatatgttggataacaatttgatattattatatcatttatattattcatagctattatatgctttacttgaatatctataggtagatttctgtgcatctcaattgttggaagcccatcagttacaggccatggtccaaatgtggtttcattttgacttgttacaaaaactgctgttcttaatccatacttattaaatctttctgtacattttataaagtgttctaaatttaatccactatatctatgtggataaaagttatgacatcctgtcaaattttctttatttggttggtagtccattattgtatctatataattagtattattactcatattgatttctattttaagattttgaggattaaaagtcattaaggccttttcagaacctgtaaatcccatatcaagccttattccgtctgccttcgtctttttaaaaaaagtcaaatctttgtagcttatttctaattcaccaaatactctgggatttacatcaagtattacctcaaaacctttaaacttagcgtattcatttatacttttaaattttttaattatattttctttagtatctttaactgataataaacatgaaaatatacgtgtaaatccattttcagcagctttatctatataatcatatatttccttagatgttgttttttctggataaattgatattcctaatcttcccatctgtgtcatctccttatatcctatatgtgtttaaatttatttcgaattacacgaaacttttttaaaaatttggtgaaaaaaagtttcatatatatttataaaaaaagaaaagtttaccttttctttttttataaacaatcaacaaaatatcttcgttacttatttcataactgttatactttgaaatttatactaatctaatatagtttttaatttccaatatagtttctaattaataagcttcttgctcttcaactttttcttcatgaagcaatctcttatcgtacatcttgacaaatggatagtaaattattattgatatagctatacataataagttaagaactgaagctctccaatctccaccagtggctaaatatgcccctactggtcctggtaatgtccaaggagcagtaactactactctggatactaaattagcactcatagcaaaccatgaaactgttgccattactattggtgccacaacaaatggtattattaatattgggtttaatactattggtgctccaaatattattggttcatttatattgaatattgctggtattacagttgcttttcctaaagactttccataagctgattttgctctaaatgcaagaagtaaagctaagcctattgtagctccagaacctccaatccatataaaccattgaaaaaagggttcagcagcaatacctggaactgcttgacccgcagcatatgaagctgtattagcatctaataattgtatccataaaggtcttgccaatgaacctattattgatacaccatgtattccaaatgaccaaaaaaacgttattaaaaatattagtataattactgatggtaatgtgtcagtggctgaaactaatggagttactaatttagctatgaagccatgccaatcaaaccctaggaaataagtaacaatagccattaaaattattattaatgcggctggtgtcagagcttcaaaagaccttgtgactgatgctggaactgcttctggcatggttatcttgaatttagatttgtcagtaaatctataaatctcaacacctattatagatgttacaatagcaacaaacattgaacctccaccaagattagccattggcatttgccatccttgaggaattgaattataccaagctaaaagttctggactcttttcaactatctttaataaatcaggggtaagaccctctattgcagtaggaactattgtcaaaaggaatgtagctgtagctaataaacctcctgtcaatccatctaacttatatgactttgccaaactataacctatgccaaatgtagaatatactgatataataaaaaatgtcattctatatggtagtaatattgtaactgcattttcctttagatactgagttaccccccatgaatctggtaatggaggaaatgctaatatcaagaaaaatgacccaactattataagtggtaatgaagctacgattccatctcttacagctcttaagtgacgttgttctgccaatctggccatagaagttgataatttactgtctaaaaattctgtaaatttatctagcatcttttctctccttaattaatatttatttttattatcattaaaatttttataaaattaactttcttctaacctaacaacactgcaactactatttactcaacaactcttgaacttgttttaataactttggtcctcctaatggactataagcttgtgcttgtattaatgcacatggtacactagcctcatcagcaaaagcttttaaatagtcaaatctatgtctgacttgtggagctaccatagcaatatcccatccatttttaacttcattctcaaactcttgagtaccaacagccaaaacatctatatctattccattttttgctccttctttttgtaatgcattaactgctatagcacttgacatccctgatgaacaaacaaataatactctcatattgattccccctgtttttttatttcttttcaatcattatagcatgtatttttgattacaggaatacgtttgtatatattttttcatattttacatttttaattgtaattttatttcatgcatttatatcttgctttaattgctttatttatctaatcattcttttgtctaaaattacacactacttaaaatactcatatcttttcttaaaaaagaaaaaagactatcttttattaacataaaatagtctcaatacttttttaaatatgtattcctttatatatccagaagtaacctattattgcaaatgataaaacaaataaaatatacagtctaaaaaatcccaaagaaaaacctctcttagtttcaacaaagtatcttgtatatgcaactgcaaaagatgtaattaatgaatttcctataacaactccaaatctattatctattccaaatatagataataacaaaggaaaaactacagtacttactagagatgaaactattagtattaatccacttttaaaacttatagttggaatattataatctgttctttgatttttctccatttctttcttagtatttttattactttttgcatttttataattattatttttctttcttttcttttttttattattagacatgtcatttacctccaaaaggtttaggtgttatattccctaaaataactttatttttagcccctgttgcagatattacattagaaaaagaattatttaatgtttcattgcccaagattacaaatgccaaagcctcctttgcatcagaagaatacccatattcatcttgagttaatacttcaacctctaataataactcttttatatatcctattaaagttagattatgaactcctccacctccaattaataaagtatctacattaacctttggaagtatgaagtttttataattataatatatagcttttgccgtaaacatagttactgttgctatcaaatcatatttatctacatgtttatatttgttaagcatgttatccaaatagacttgtccaaatacctctcttccagtgcttttaggtggcgcttgactaagatacttatgactcatcaaatcttttaacatttcttcattaattttaccttttgatgcaaagtatccatttttatcatactttctattaaataatctttgacatactccatctattatcatatttcctggtcctgtatcaaatgcaaatacatcatctatgttacatgatttaggtattatagtaatatttcctattccaccaatattttgaagtgctaaatttttatttttatcactatataataaaaattcactatatggtactaatggagcaccttctccacctgctgctatatccattactctaaaattagatattacctttgtatttgtttcatatgctataattgctggttcacctatttgaagcgttgaagatacaaaattattataacttcttggtatatgaaagattgtttgaccatgagatgcgataaaatccaaatttgctatatgaaagtttgctttatgacacactgattttacagctttactaaataaatatccaagcttaaaatttaagctacagattaaatcaacactcgattcctcttctatacagcactttcttatttcgtcttttatatctttaggaatttctagagttataaattctatttgcttaactttagtatttctaccattcccactaatttcagctagtactgcatcaactccatctaaggaagttcctgacattaaacctacactatacatagttatcatccttttaagtttatagttattcctccccaaatcaaggtattaagtttaataattttagaattaatcttatttcatctttaattgcgataatttactcttacgaaattaatcgagttaatcttatacacgttttttaccttagctaaatcttacattaatttattttcagtgtcaatgtaatgcatgtaattttttttcacaaacaaaacatattctctctccaaaaaccatattaaaatagttactacaaataaaaaacataccaggtacctatctgatatgtttttcatatataataattattattttataatatagatagaacatcatttaaggcactaattaaatcttcactattttcaagaactaaatttattcttattgtatatgtcgatttgtatatgatgatagattttatagtctaataacctaactatctaggcttaaataatccgatatatcataaaagtagatattaaaaattgtatatgaaccaattttcgaacatacctcaatctcatgccctaaactatctatcattttctttacaaaatacatccccattccagtagacttatacaattgatttcttccatttttccccgtaaatcccttgtcaaaaaccctagatatatcttcctcatttatacctataccaaaatcttttatagataataccactccattttctaacttttttgaattaaattcaatcttaccaacttcctttgaatactttatagcattattaataatttggtctaaaacatatgacatgcatttagaatctgtgtaaacatcattttctaattcattcaaactaacttctacattattttttataagcaaaaatgaattattttttatagacatttttaccaatttttctaaattaaatttatttataaatacatcttcaaacatagtgttgcttctactactatacaaaatagagtttactaaaaaatttatctttgcaacctgattcttaatatccaaactatcttctatgctacttaacctatctgtaattatacttaaagaagatattggaatttttatttcatgaacccatttagctatgtaatcatctaattcttttaatgattgtttataagtctctatgtcactattattttttatttttaagttttctataatatcttttattagattttcttcaaaagattgtccatcaattaaataactgtctatttcaccactattttctatacaattatataaatttatataactatttctaaaatttatataatctataacaaaaaataccattattataaacagcactaaaaaatctaagtatattaattctgaatatctattttttaaaatatctatagcaaataaatagatatttattatactaactacaactaaaggtagagcaatatacttagacctaccttttaaatattttactagcattatattatatatcctatccccttcttagtttttataaaatcatcaaaacctagttctttaactttacttctcaatctattcatatttacagtaagtgcattgtctgtcacaaactcatcattatcccatagagtcatcataagactttcccttgatacaaccctattcttattttttaataataatgttaaaatttttatttcgtttttagtcaactctatacttttatccttatacttatgttttataatccctttccccacatcaaacatcaaatcttcacaatacaaaatactattagaatcactataattatagactcttcttattataccatttattttggtaaccaatatgtctatagaaaatggtttggtaatataatcatctgctccattatttatacccattattaaatccatatcagaatctcttgatgataaaaatattaatggtacatttgaaatagctcttattttttcgcaccagtaaaatccattatataatggtaaatttacatctaaaagtactacatctggttttttatccataaattcatctaatactacctcaaaatcatcaattaattctactttaaatccccatttttcaagtgctaacgcaatctcttttgataaatcaatatcgtcctctactaataaaattctatacatttgtatattctccattatcctaatatttcactatgccatgaattattaatatcataacatattttatataaatttattacccaaattatttagttaatcaacaaggagactcttattacaagaatctcctttctctttattaatatatcaactaatttttatacactacactcttaaacttattaacagatactgctccatatattacgaatattatcaaacatatcactaaacttagtatatatataccagataaatcgttcatcaataaatctcctgctaatctcaatgcaaaataactagatatagttgcacttaacattggcaaagtataaaatatagctacttctttaagtatagctctatttatatctttttctgtagtacctatttttaataaaatcttgtatttctctttatcttcatatgcatcactatatattttcatatatattatacttccagctacaattgcaaagactaagaataaaaacacaagcactacatatgcaaacttcatccattgactctcaccttgagctttatatccattctgaatatatccattttttaaacttaaattcttttcaatattgttgaacattacttggctattttcttcttgaaatacctttgcaccataaaaatatacttgttgacccttatctcttagtttaaaatatgtatcatcatttaccactataatactttgattaagtcctgtccctaatactggaacttttacttctccccttgaaatattatataactgaccatcaagttttgtcttgacttcttttgtagctattgatgctatcgtttgaggactttttagctctattacattatttccactaactaatctttcaccatactcttttaattctttatcattgccattcactttaagagtattacaaaaatcactatatttcattatagtatctgttgtatcataagcttcttttatatctgttttctttaagattgttagttctggatttacggagtactttatcttattagtatcttttattatgttctctatttgttttttattcacttcatctttatccattgaaactatgctaatagtgtacacatttctttgttcttgggcattcttatgtatatgcttcatagcaactgaagcaccaagagttgatattgttgtagttataattatagctattatagcataagttttatagtttttatttaatcggtagtttatattgtttatcgcaattatattatttccattaaataatatttttttatttttgattataatatcaaatataacaggcataactgatttgaataagccataagtacctactattattatacctataacaggtagtacactagttatatctccagttcttatattcgtagaaagatagtatccatatcctattactataagtgatactatagctaatatatatatacctattcctacctttggtattttttcttgttttttagatatattgattagatttattacactacttctacatattgttataaaaccttttacagccattattataaatatagaaataaagattaaagtagcatatagtatagcttctatgctaagtccattagatacctttatattaaatccagataattttattatcactacttgaaaaaatctagatgttattatccctataattattcctgttatacaagaacttattcctataagcatattttctacaaaatatatttttcctatagtatataaatctaatcccataaaggacaatattccaatttctttagacctattcttaaaaaatatatttgttgcataccatataaagaaaaataaaaatactgatagtatcattattacagctactaacactgatagtgtaaattttttattttcctcttgtaacacatttatagcatctccatatcttaataattcaaaattagtcagcacaactactgaaaaaaccatagatataaaaaatgctagataagttcttatgttactcttaaaattattataagcaattccaagtatactcacttacatctcacctcccatagaggctagcatatccataatttttccataaaattcttttctactatttcctttgtttaatttacactttatatttccatcatttatcatatatacttcatttgaataacttgccgttagagggtcatgtgtaatcattataatagtagcgttgttttctctgtttattttttctaatgattctaaaagttcatatgctgatttagagtccaaagcacctgttggttcatcagcaaatatgactgctggatttgtaattaatgacctagctgctgcgcctctttgtttttgtcctcctgataactgatatggatatttatctaaatgattttctaatccaaattttttagctatagaaaataccttagcttctatctccttgcttttcttttttcctaatgctagaggaagtgctatattgtccattagtttcatattgtctaatagattatagtcttgaaatataaaccctattttttctcttcttaattttgatagttcattattttttacttttgatatattaattccatctagtattatttctcctgaagtttgtttgtcaagtgtagacattaaatttagcaatgttgtctttcctgcaccagatggacccattattgctataaaatcaccttcattgactgtaagagatatattttttaacacatttgttttaaatccttttattccataatcttttgatatattttttatttttaatatttctttcataataatagcctccagttgctaattttttaatatatatttattttaaaggttttatataaataaatccttaagtaaatattacattttaactgttagcattacacttttgtaacatatggaagactattataattatagtggaaatatcttaaaataaaagcatgattcacttttttgtataaacaaagaaaagaagcccctaagaagcctctaatctatacaataattcttctctataaaaaaccaaaaatacaaccttgattgtggcaaatacaggtactataaacaagtgatattactactatatattaaaacaattattcttgaagataattcaataagactatcaagccataagctaagcatccaaaaagacttaatatcattaatgtataattatacccaatattaatactcaaaaaaccagcaacagttggaataatcagagatgaacctcccataaatatacttaaagctattaattggctactacttctaagttttttaggagaaacttcaaatattaatctttttgaagtaattaaaattaaaggagtagaaaacacttgaaaaacacacagtataataatgatatttgaatcatttgttaaagcaaataatagaaactgaactgttatcataatagcacttaattttaataagtttaaactgctatatttttttaataaataagaaccagccagatatgttggtatctctaataatgactgtaaagaccactttaaagatatctgagaatttgtagcatttaaagctatcattttatctattacagtacagttatttgctaccaccattgagtataataagaataaaatacatactagtaagatatattttttatcttttaataattcaataatatctttattagttacatttattttcttattaatcttttcaatatcaggtaataatagtatatttataataagtaatactacaattaaaccaatcgctacagataatccaaaatatgagaatctaagaatcaagtaagatgctaccatacttccaatagcccatccaatcgacccaaaagtcttaataaatgacaaataattattaatattatctccacaacctattatccatgtatcatataaactacagcaagtatttaataatcctcctgataaagcaacaagtaataagtatattataaaagttgcagattcagtagaaaacataataactgatgcaattccataaactgataaactaattaaaacaatttttttcattgtttgatacttatcagctaatactccaaataataattgaaataatatattggttattgcatagctcgataatataattcctctttcaaacgctgagtaacctaattttgataagaaaggtgtgaattttgttgaagcaaaggcaaaaataatatatgagaaaaaatagaatatgataaatttaaatttaatcgctttattaatcataatcaatcaaaattgataactttaataccactatttccttcctgatttaagtttgaaagatgatattttaccgtattaggattctctacaataactaaaggaatatataaagtattttcaagtaacttattatcaatttctactaacttttcccccatattaacttcttgaccttgtttaacttctaatttaaagttttctttttttgttgttgcactatccaatccaatatgaataagaatttgaacatcattttgcaatttaattcctatagcatggttagtttgagcaataaaacttattactcctttagtcggtgatttaagaatattgtcctttgctatcatagcaaatccatctcccattaccttagttgaaaatactttatcaggaatttctccaagattaattatttttccatcaatgtatgaattaattgtacttgcttctttttttcttttaaagaacattatagacactcctctacataattaactttattctaattatcattacaaataacgatattaagcatactgcaattgaggaaaaaagagccttatagctctttccccattgtagttctttaatactgcttatgatttgtttaattccaacaaatttataaatataggtaaacatgataacaatagttattgtgtaaatttggaatatctgccctaataagactaaatagaaagcaatcatgttttcttttatctctttattcttttttatattgtaaataacatatgcactgtatactgcactaaagttagagattaaatttaaacttgcattaacatcattgtttaaaagttgtgaaaatgaaatgtttgtaaataatgatgtcaattctaaatacactatatataaaacaggtaatattagaaaacaaaccataaccactgaaagaaatatattttcatcttttaatactgctgttatattttttattttatttgttatcatgtttttgttctccttatttaaaagttggccagaaatccttattagccacaatcatttcatctaagatttcttttgctacttttgcacttggaacagttttactcatagtaaacgactgccataatttttgataacttttttctatccatgcttctacagctaatttttcagaagcaacttgttgttccattaaacctttttggaaagttggaattttacctatagacataggttcaaccatatcttttccaacaaggcaaggaatttcaatcattgcatcatctgcaaaattttcaatagctccattattaggaacaatcagtaaaaatctttcctgagtattaaatgctaatgcacaagctaattcaacaataaattgagaatgttcacttgcatcaaaccatgtatcccttgctgtgccattttttataattctttcacattcttcgaatgtatccttttctcttctatccataatttcatttgctcttgtataatttggattagcatgttcaacagtttcatcagccattaaataatattttaaataagtattaggtaatgtagtcggttctatttctaataagtcctttgctgctctcatagtttctaaccaactagattctttgtgttgaccttgaggtgtaaattcctcatatccttttttagcacaatattcctgtaatttaggcattaaatcatttccttctttgtccttaatacttgtccaccacccgaaatgattcaatccataatatctaacatcaaagtctttacgagaatttaaacctaaaattctagcaaatatttcctctaaacatactggcatatcacaaatattaataattcttgaatttggtcttaatacacgacatgcttctgcaactatagctgctggatttgaataattaagcatccaagcatttggagaatatttttccatataatcaatcatttcgattattggacctattgttcttaatccataggcaattccacctgccccacaagtttcttgaccaacaaccccatattttaatggaattttttcatcttgttcacgtaaagcatataaaccaacacgaatttgtgccattacaaaatcaatatcagtaaatgcttcttctggatttgttgtataactaaatttaatttctggatttttctctctaacaattattgcacatgcttcagcaacttttctttgtctctcatcattattatcatataatttaattgattcaataggaaatttagcaacactttcaattaacattgttacaattccagcagtataagtactacccccaccagcaattagtatcctctgtctttttctttccatctttccttctcctttataataaattttcaaattcttctcttacacttggtactgaaagcccaataataatctgaatagcttttccattatgcactaaaccatgtgcacctactaccttaaaatcttcttctttagaaataattgagtcatccttcaaggttaatctcaacctcgtagcacagtttgtaacatctacaacattttctgctccaccaactaattttatgtattcagatgcttgttgagaggctttactcaatttatttcctttttcatctttagtttctaagtattcatttttagtatatagttttgtttcttcattatcttcctctctaccaggagttttcatatcaaacttcttaattaagaaagtaaataaaaagaaccagataaatgaaaatataatccctacaacaacttgaacaacatataccttccagtgatacattccaagaggaagccaatttaatacaacccagttaataattcctccaccaaaatcaccaacaactcctaaggcaaacgaaatcgtttgcaagcatgcatctaaaaatgcatgtactaggaataaaagtggtgctacaaataaaaatgtaaattctaacggctcagtaattccagttaatactgcagtaagagtagcaggaatcattaaacctaatacttttttctttttttctggctttgcagttacatagaaagcaccaaatacacctaatgaaccaaacaccttcgataatccagataatgaaaatccgattggatacatttcctttagagtcttagctgaagtttgaaagtcctgaatatgagtagcccaatatactgatgtaccacctggaacaacaacactatcataacaaattggtgcatatacaaaatgatgtaatccagttggtattaaaatcttttgtaagaatgcataacaccaaactcctatatttccactatttataaaaaacgtttgcaaatgtctaataacattttgaatatgaggccaaataaaacaagttaataatgcaactggtatcataacaaagaaacaaattgcaactacaagtgatgagcctctaaataatccaataaaatctggtagttctttatcataaaatctattatgaatataaatgacaatacctgatattaacaaagcaccaaccataccagtatctaatgttttaataccagcaatgcttacaagtccacttccagcacttatttcagctgcgaaatcaactccaaagctttttccccaaaaacttaacatagaacctacaaaataattaaaagtcaaatacgttgctaaagcctccatacaagctcttgcttgttgcttttttgcaagtgctattggtaaagaaatagcaaataataatggtaattgattaaataccatccaagctccactagatattacaccccaaaattggtaccaaatattttctggtgtagcaagtgaacccataattgactgattttgaaatacaattgagaatccaaccattatcccggcaaaagcaaataatagtgttggtgtaaacattgcccctccaaaacgctgtattttcttcatcatataaattactcccctcctcatatttttagtttatctttggccttagatatctattattttaacaggttaataaatatatacaatctttagggtacatttggagcttattcacagtcaaataagtttttgcacatttttatgttcaaattctcataaaaaaaagaatgactacaatttgcaatcaatcccttctgtaatcattctatgccttttataaatactatatttaataaataataactcaatcaatataaaatataacattgtcaatttataactagggtgcatttgtaaaaatgagatattagtcgctgaaatataaattgattcatcacttaaatcagtcaatgtattatttttaaactctgtaattgaaattattttagttcctattaattttaatcttctagcaatattaagtgtattctcattctcaccacttagggatataataatcataacatcatttttactgacaatattgtaaaaagaatcatcaaatgttcttccctcaaaatcatatattatttcttgacatgataagaacattctctttatctgttttgcaaccacattttgaatatcacctgaaccataagcgtatattgttcttgattcataaagaagtttacacaatgcatcataatctttatttttttgatcttcaacatacttaattattgaattacatgcaatatcaaatgactgattttctatgacatgaaccttttctgattcccagcttaataatactttaaactcactgaaaccttttaaatctaattttttaacaaatcttgtaatagttgcacgagacacattacatttcatagcaagttcatttattgacatcttactacaatgttttttatttgcagttatatatttccatattaataaatctgtatcattcaatttattataatttaaaaaaatcatttcttctaatctcataaactattatcccctttaattaaaaatcgtcataaatattataccaatattcaacattaaattacagcgtattcttatatttactatttagcccataaaattgactataaaaaatactgctataattgatgtttaaaaaaatgtagttttaattttattcttttatctaataattaatattttcaagttctagtgcttttcttatgcaattatcatctttaaaatcagcagtccttttacaatcttttactttaaattctggaatagttttaaattcctcatcacatattccattcttatttaaatacatacaacttgccattctaactattagaccactattttttaaattaaacaatacagggtctatacaccctccatctccgccagtagtttcaccaactaaagtcgcaaatttagtttctttacaaaacattgcaaatgactctgatgatgaatatatttttctatcaacaagtaagtatatattacccttaaattttgaatcatctgtagattttatagtataggaagtatcttcaaaatcattaaaatcttttataatttctttaggtgcattttcctttacacttgctggtaaattttctacaggatttaattttatatttcttgcatttgtatatttttttactatttcattattatttctataaattctataaccatttattttgacatcattttttatgagtttagatacgattccctgccaatacctatcacttccacctaaattacctcttatatcaataattaaagctttatgtttttctaaagtgttaatataatctccaattatttttaaatcattatttatagagccattctttgatgacattgatggtaaatacatatatccaatctgacccttaataacatcctttaaaattaattctttttttacaaaaatatcatctggcatttttattttaagattcatagagtcatatctatccacaacttttttatcattaagaaaatcataccaatcattattagagtatgatttcttaaaaagttcatatcttttcttattatctattacttctgtgtgtttattatttaaatcagataatatagatgacagttcttctataaattcttcatcattttcagtgttttttattcgttttgtatattcatccttatttgctaaccaatcaatattattaagtctcttatttacacctagatatggatatcctgtctttacaacattatacacataattaaagtcatccaccttttcctcttcagacaactgattcttttgagaataagtagaattacctaataagattataaatgctaaaataattactaaaaataatactttctttttcatgtaattctcatccactttcagattttatattttaatacattgtatcattattttattatcacctaaacagttaaaagaaattcttgaagatatattccactattattctatttaaaaatttttatttgtattttcaaaattatttcatgaaagttataaaataacaattatattcaaatatctattttactgctatatcctgaaagtaaattcttatcagtgatatactaaaaaagatatgctaaaaaatttatccattataatgacttaaatttagatactttactgatttttatttattagttgagaaaggtattgataattaaaaatattgataactatagaaatgattattttttatagaaattttaaggatataaactaattatacttaagtctatatccttaatttatcatgattatgagaatttttacaaatacttatctttgtccgttttagaataaaaacaagaacatatcctgttattttattcaaacatccaagtttaattactacacaattacttattagaaattgtatctacttcatatatatatctgttaagtatagcttctagcatttcttgtcttccagacttattctttataactggcatttgcagtgcataagattctaactctttaaatccaaccttaccttctactatatccttacctataccttcactaaaacttgcatatctttctttagtaaagttttcaaatacctcatcttctaataatttatgagctattaataatccctttgcaaatgtatccattcctgcaatataagctaggaataagtcttctacctcaaaagatgctcttcttactttagagtcaaagttaaatcctcctggtgctattccaccttgctttaacacttcatacatagcaagtgttgcatcatatatatttgttggaaattggtctgtatcccaacctaataataggtctccttgatttgcatctatactacctaaaacattgtttattcttgctatatttaattcatgttggaaagtatgtcctgcaagtgttgcatggtttgcttctatattcattttgaagtatttatccagattatactttcttaaaaatcctaaaacagtagcagtatcaaaatcgtattgatgtttagtaggctcttttggcttaggctctattaagaattggccagtgaatcctatttccttagcataatctacagccatttgtaagaatcttgcaaagttatccatttcaagttctgtattagtgttaagtaaagtttcataaccttctcttccaccccagaatacaaaattttctcctcctaagtacttagttatttccatagcttttttaacctgagctgctgcatatgcatatacatctgcattacatgttgtagatgcaccatgaacaaatcttggatttccaaacatattggcagttccccataataactttatacctgtcttttccatattaacttttatatactcaactatttcatctaatatcttatttgtctcttctaaatctcttccttctggagctatatctctgtcatgaaaacagaaatactcaattcccatcttagacataaattcaaatcctgcatcaactttaatctttgctatctcaattgggtctgttacattattccaaggtctctctactgtgcctactccaaatgggtcattaccctctccacataaagtatgccaatagctcattgcaaatcttaagtgttctttcatagtcttattacctaccacttgttcaggattgtagtatctaaatgctaattcattgtcagattttactccttcaaattttatctgtcctattcctttaaatatttcactcatttcatgtcctcctaatattttacacatataatatatgtcgtatgttttcttaatttaaaactattttctatctttatttttctttttaagctaatttaattatttatttttgtattaactacttcatctaataacttaaagtcatctttcaaagatttgtatattcttttatacaatctatgatatatcttgtatgtatctacattttcacttattggttctaatttagttgaagtttttattatagcatcacaagctttttgtatattttcatatattccagctcctactaatgcaagaattgcaactccaagtgctggtccttcacttgaatttatagtatatacatcttgattaaacatatctgcttgcatctgtctccatactttactttttccacctccacctgaggctcttacttcattaacgtctatattaagattctctattatatccatacagtctttaagactatatgaaacaccttccattattgaccttgcgatttcttttttagaatggattggagataatccaaagaacacacctcttgcataagggtcaagatgaggagttctttctcccatcatatatggtaagtaaagcaatccattacatcctgttggtacttgacttacttgattatttataatctcatatacatcttcacctaaagaatttgaaacttccacttcactttgacagaaattatctttaaaccattttaatgacaatccagctccttgagtaactcccataacatgccatgtatttggtattgcatgacagaaagtatgaactctaccttctttatcaatttttggctctttcgtataagcaaatactacacctgatgtacctatagtagatgaaactactccatctttaactattccatttcctatagctcctgctgcttggtctccagctcctcctaccactattgttccttctttaagccctgtcaaacttgctacatctctagtcacataacctgtaatctcttgtgattcataaactttacctaaaagatttttatctatatttaacttttctagtacttcatcgctccaatctctttttcttatatcgagcaactgcataccacttgcatctgatacctctgtagcatattcacctgtcaatttgtatcttatataatcttttggaagaagtattttattagtatttatatatatatctggttcattgtttctaacccataatatctttgatgctgtaaatcctgtaagcgctggattagcagttatttcaatcagtctttcttcacctactaaatcagttatctcctcacactcttttactgttcgttggtcacaccatattatagagtttctcaatgttttaccttcattgtccagcataactagaccatgcatctgccctgataatccaattccttttatacattcactgcttatatttgaactttgaactacttctcttatagattcgactacagctttccaccaatcatttgcatcctgctctgcccaacctgatttctcttgtataagaggatattcatatgtacaactttttataatatttcctagtttatcaaataaaactgttttagtacctgatgtaccaatatccacacctaatacatactccaacttcatccctccttgaatgccacttcataactatcgttttcctatcctaatttttttatattttaggtatattttacttgctttatttttgttagtatattaaactaacttatgaactaataataaaatatttaattatctttgtcaatgcaaaataaccttttatttttgtgtaaaaagtattacaatattattttaaggaggaatatcaaattggttactgataaatacactattcgagaaatgaatgaaagattggtacttgaacaaattataaaaaatggtcctatttctagggcaagtatagcttctactataggattgaataaagcaactatatccgctattaccaaaaaacttattgatgaatctctagttcatgaaataggaattggaaatagtactcatagtggcggaagaaaacccatattattagtatttaataaatgtgcagggatttctttaagtatggacattggatacgactatatattttcttctctatcttacttagatggaactattataaattctaagaaattaacagatatacaagtaagtaaagacaatgttatacaattgatagatgaaattataaatagttataacatatccaaaatagacactccttataaggtaattggtcttactttggctatacatgggattacttgtgaaaataaagtattgtttactccatattataatcttaatgagattgacttatatagcatccttagcaaaaagtatgactttcctattcatatagaaaatgaagcaaacttaacagctttagctgagaatactttttcaactgtacataactcactacttagtctcagtattcacagtggatttggttcaggcattataataaataataaattatatagcggcagaaatggtatgagtggagaaattggtcacactatcatcatgcctaatggtaaactatgtccttgtggaaatcgtggctgtttagaacagtattgttcagaaaaaaaggtatttgaacagctttcttctttagaaaatattcctaaaatagattctgatatagtaaagcaactatattatgaagataaccagaatgccaaaaaagttattcatgagttttgtagttacttaacaatagctataaataatgctattacaacttatgctcctgaaataatatatttaaatagccaaataattagtgatatccctgagatattacagattacaaaagatatgttagttagctcttttaacaaaggaataaatatagaaatttcatcattagggtctgaggcatctctatatggtggctctgccgtaaatatcaagagctttttgaatatacaaaatttaactttaattaatgaaatataagggttatgactatatacagccataaccctttaaattatacattctaaaattagatttattatatagtttatgcaagattagctatattttttaaaaattgtatatcaattaagtattaacacaagtattttgttttaaatattaatataatcttcctactcatcatcagataataaacttgcattttgttcaaccatagaaatattatctttacctattttctctaattttgctgccaattcctttgtatctaaaaaagctgattcaataaccatacctaaatttagccctgaaataattttaattcgactgtcatcattggctactaataaagcagcattgcatggagttccacctagtaaatctgccattataattatttctgaactttccttgtacacttctaaagctttttttaatttttctattgttccttctattccatcatcttgtttcatatttacagtaggataatctatagaatcccctattatcatttttgcagaatttaagacttcttcagccatattgccatgactcatcaaaataatactattcactttaatacacctctttaaatctataagatgtctacaagataagttttcttatcatcaggcgtcattatagttgtaatttcaattccttcatctaaaagtcttttaaatgcttctttctcttcttcagtaacactgatattaggtcttagaactgttgtatcttttctacttgacatatttcctacatttatattatgtattttaaatcctgcctctacaaatggaataaggtccacaggagacttaacaattaataatacattttgtccttcatactttcctgcagtaatattttttatagcagtctcttctgtaattatagatgacgctatacctgcaggtgtagccattcttaaaacttgtttttgaacagaattgttagctactgcatcatttactaccattaatcttgtaacacccaatttattactccacatagttgcaacttgaccatggattaaacggtcatctatacgaatatttttaatacctttcatttccatatctaatatcatcctttccttattttaaaatacctaatgcatataaaattattgaaacaaccattactcctaaaattaagtatataggttttatattctttttaagagcccaataaacaatcacaactaaaattgcaggaactaacccaggcataatttggtctaatatttcttgacctttcattgtaaaatcaccttgttgaaagttcaaagcaacattagcttttacaactgaaggtattaatgcacctacaaccattaaacctaaaatagatgtactctcagttaaaatctttaaacttttttcaattgaagatattagcttagtacctgatgtatagccagcattaaatagtggtatacttaataatttcaatgctacactcactacaatccacagtaagattccaaatggacttccatctatcgccatattagctgctatagctccaaaaattgtccacggaataacgacaaataaactatctcctaaacctgctactggtcccatcaagcctgttttaattgaagcaacagcctcttcagtctcttcacttgataactcctccattgctacattaatacccaaaatataaggggcaacccaaggattagtgttaaaaaattgtaaatgatttaatacagcactttgtaacttttctggattatctttgtatactacttttaaaaaaggtagtactgcataacagtatgccaaggcctgcatcttctcataatttgaagaaacagaactagtaaaaaaccagcgccataagacactttttttcaccttttcatttgatttatttaatgataccttatcactcatcttcgtccatacctcctactacagtatattgttgttcttgattttccaaattctttttgtaaattataagtgcaattgctccaccaattaaagctacacctaataatggtactttcatatatactgctaaaacaaaaccaattactaagtaactaaaatactccttagcaggaagatatctaagtaataatcctatccctactgctggaagtagtcctccagctactgttaaaccacctgttaaccattcaggtgtatatttcaaaatggtattaattaaagaaggtccaaatattacagatagagcaactggaatacctgttgtagctgctgttaatagtactcctaacatttgcatataggttatatttttataatttccttttttagctccatcttctgctttatgaactagccatataccaatagtatttctaagaacatctaattgtaccatcaataaagcaactggaatacctatagagattcctacagatgcttcttgcttagtcgtaatagttataaatgtggctactatacttgctgtttgataatcaggtattgatgctccaccaaagttactaatacctaatgataatagctgtaatgtacctccaatatataaccctgtatttatatctcctaagataagaccagtaataaaacctgctgttactggttgatatgttccaaacattgttgaatttttttcatagtttataaaaaatccatatagtacgattaataataattgccataattgtggctccattatgatttcacctctcccaaaatattttttagttctttaaaattataactggaatcttgctttaggaaaataggaatttcttccagcgggcattcaacttcataagttttcccaccttcataactaactccactaaatatattttcccatgtatgtccttttggtaaatatacttttctacttctatctttataattcattattggagctaccaaaatttcatctccaagcatatatgtattatccacctcccaagttttatcatcttcaggaaattcataaaataaagttctcataactggtgttccatcttcatgcgcttctttcatcagtttttttaaataagtttttaagctctctctaatttttatgaattttgtaagaattacttcaacttcttcaccataagaccatatttcattaggagctccagttaccattgagcctccacctttatttgataatggtttactatgaggcaatctatctccatgcattctcaaaattggtgaaaaagtagcatattggaaccatcttaccataagttctctaaattctgggtctttaggatttcctccatggaaacctccaatatcagtagtccaccatggtatacctgccagtcccatatttaaccctgtatttacttgattattaaaagcctcaaaactagaatcaatgtcaccagaccatactaaagctccatacttttgagctcctgcccaagctcctcttacaagagttacaacagactctatgtcattatgtaaaccatcataaatcatttttaaataatcaataggataaatattaccacaacttaaaacatttccttttttatatctatagttatcaaaatcatacacagaatagccaggttcagctacatctaaccaataatagtcaatcccaagttgtttataatttttatctattctatcccaaacatattctcttgcattttcatttgtcatatctacaaagactgtatttccttgaatttgcattgtcattctaacaccacgattaacattgactaaatagccattttctaaataatcattgtagttttctgcatcactttgaactgtaggccatacagatactattggttctactgaatactcttctttcaattttttaactaattctttaggatttttccaataatctaagtcaaatttatattcaccttgcttaggccaatgaaaatagtcaattgcaattgatgaaagcttaattcctcttttagaatattccttcacaacatctaaaacttcttctgaagttctatatcttagtttactttgccatagtcctaaaaggttttcaggcatcataggaacagttccagtaacttgagaataatttttatttaactcttttgggctttctccacaagtaatccaataatctataaaatttgtagaaaacatcttccattctgtcatatttttagcaaaagatacttttccaattcccggattattccataaaagtccataacctagactagaaatataaaaaggaactgatatttgagaatttctttgggctaactccaaaacagtattctttaaatctaaaaatttatgttgatattgtcccattccaaaaatcttttcagaaggctcagattcaaatctagtagttacttcaaattctccactatagcttggtcgatattctcttgattttaactttagagtagagttaaagtctttggtaatctcaattgtccctacatcttctccaccatcatcatgttttacagctcttaatcgaatatattctttcaataatatttcatttttatcattataaaaagtaattctatctctatggtctaagacagcttttatctttccatttttaatgattgcacttccatcttcatttttattaattgtaatatcatctttatttaacttaggtttttcgttaagagcatagttttcatcaacaaaattttggtctacaaacgacctaatacgtaaagagttttttccccatgcttctattcgcaatagttcattgtcaaatcttttttcaatatagtcttcagatatttttatcacggctacctcctaaatcaatggtataatattctatctttgtgtagcttaagttaaataatgtcgtttagtatcgttatttataaattaggttttatatataattcatttgtacattaaactaacttaccaataatatactttatttgactttgtttgtcaatcgctttccggattttagtaaaattttctaatatgttgcttgaaagtcgttcttaatatcttttatttatacttttaatatctgtgatgatacctatatacatctagttttttttaaacacatacaggaataaaatttgcctattatgtagataatattggacttgaaaatatgtatagtgaccttataaatacagataataatatattagatattgttcaaaacaatggattttataattataaataatttatgaaattatttaagaaaatatataattgtataccaagtcaaaaacgacaacaaataaataaaactaaaaaagatgttgtctcaaaatatagataaatttatttttcattgctaaaatgattaaaatatatttgatttaatatacttgatttaatataaaaaaagagtgtctcataaactaaaaagttcacttttagacactcctttatatatattatcaattcatttattacctctctacattttctttcagctagtagatacatctttataagtactaattactccacttaaaaatgattcaggtactgtccatcagtcatatttttctgccaaatataatggtgtttcataatgagacaataaatatttatatctttacttatcttctctaagctcgtcaaatccaactataggtatctctaaattatattctttaagtagcttttctagctcttctataaaaatacctttcccatccaccatttgtatatcatttattttatccatcaattcattgcaaccacttagctcaccaaaccaacgtttagaactacatgtcttattataaccacaacttggactaccatctattgcaatgatactttttatatcataatcattttttaaatattcattaaactgccttacatgaggtattaacatttgcctacattgttctctaaaaaacaaattgtcaaactgttcttttacatgtccccacctatttattccatacataatcatttctgggcatggtagttgaattattccataccctttatttattaaatttatcgctatattttgtgctcccttaaattctgacaatccctctactttagaattacaatttaatatacaatgacatactactacaatctctctatttctcttcataataatctccttagttattcttaattttaatgatactacatattttgataattatattatttatttgttctatatttccaatattctatatagaaatatacaattagtaatcttttataatctatactatgataaatgtatatatttttttaggaggtattataattggatactaaaaaagtcacattttcttcaatatgcatagttattaatattgtcttaggtatggttatatctatgataaatataccattattatttttagatacagttggtactgtacttggggctgtcgtattaggtcctttttggggtgctcttattggtgggtgtacaaacttagttttaggtgttatatcaggtcctacaaatataccttttgctcttgtaaatattgttcttggtcttattgttggatatatttctaagaaaaaaggttttggttataaagaagctattattacaggagtaattttatctattgtttgtcctttaattggtactcctatttcagttttattgtttggtggtttaagtggaagtggtgctgatttattggttggttttttagttcagtctggtcagaagatatttactgctgcgttctttccaaggattcttagtaatatagtagacaaacctttgtcttgtattatggtggtatattttataagtaaaatgcctaaaggttttataaaacaatatagtaaaaatacttctagttcatattaataaatcatttattatgtaagatttattactctttaaaatgctatatactcatttttatataacatttttattaataatttaattagatagtatttgtattattttaattaaacgtaacctcttgatataaatttgagctataaatctatatcaagaggtgctattttatttttaatataattaatattctattacgcaaaaaatgcatatatttcattattttatggaaaatattacttcatttaactctatatcaaactcattaagtaaaaatctaattatatttaatttagcctctgtatttaaatttgtttctaaatatatattttctgatattttaataccttttcttaatttatatacatctctagacttaatattatctataaaatctcttttataagtcttgtctacaatactgttaaaccttacagaatccaaatcatataaagtaagagcaacttgttcataaaattctgtccaatttttagccttatatgactctcctaatatactaaatgatactatactttcatttgtaaaattaacatcatcatcctctaacgtaaatatattttcactgttacttggaggttcatatgtaacacttggatatttccaaatttctacagctctatctagtaatatcttagttctattttttatttcttcttcattccatttatctatagatgaaatatatttatttagataaagcctactatctttaaatccatcttccatttctttcttttcttcaaatgttttattacttagttttgaattatatcctgtcaaagttaaatttccaattgtatgtaaatatttatcatgtatctccttatagttatctcctagtgattccttccatttatttgttaatgtctgtggcattatatgctctatatttagcatattattattgattaaattttctaaatcaacaatttctttattattataattctctaacctctcaagtatatataacttattctttgacttagtattatatatatctttagtttcaaaagcatttgaaaattcactgtcagtaggaaatctttgagatgatttcttatttataaaaatatatcttaatatattagaatagttttctttataatcactaaattttttaatttcccttcctaagttcataaatactttattcagtgcattcggaggtacatcacatactattcttcttaatataaaacattctactaaattaagggattctacaagtacttttttatttattataccttcattataatcattaaataattctaatataaacggatatgatacaaatatttcaagtttgtttatccttttcaaaactttgtttacatcattatcatcagtacatgaataagatatctctctataatagttagaaaatttaagtaaatcttttaataaaatttctatatctataccattatctgatacataccttttaaaactaaaatatactttatttttattcggtatacttctctcctttatagtcaaatagtctcttataaagctacttacgttgctacttgtatttttttcaattttataccaataattattataaaattcctcttgtaacttagagcttctacccattaacacaaagtttcttactctatcagcttcacttaaatctaagccagttgaatttagactttcaaagattaattgagggtcatcttcaccattttttaactctatttctactatagttaatttctgtatagcatcaaacaaatcatctattgatatattatcttcttttattctattataaaaatataaataatttgaaactatattagaatttctatctgtattcatttcttcttcaaatagttcatagtaagcttttctatcttctgctattggttttaactttatttttccatctttatctcttgagtgcttgtttataagataacactccttaatctgttcttctgttgtaataattccttttgattctccaaactcttttattatttgacacatggcaatcaataatattgacacagtagtcactctttgttgtccatctattattaaatattcttttcccatactatatatagatacaactgaccctaagaaatgagttctaaatccagaatctattatatcctctaaatcatcaaacaatcttttacattgttctttcttccagttataatttctttgatatacaggcactacaaaacttttgtttgacccctctaaataactaagaaattcaatttctcctgctttcatattaactccccctataagttaaataaattccattcataactccatgtatctatatattatatcaaaattttgactcataaatgtatatgaaagccttattatatacctttttatacctatttttattttattaaagtaaatacatgattattctataaaatatacaaatacttaattttaaaaattattatttaatcttcttcatgagtaattcatagttatttatcaattaaaaagagatattgcataattattcaatacctctctttgtatatttacattatccatatctagttatctatttcaacccaatattagactacctactaataaatttattctctacataattaacaataattttgcactaaataacatcattagcctatctctgatgcattttctttaattttatttatagttttaatcaatttatttctctcttcaatatgattttcaaataaatcaattatacttccaacagttctaaatgggtcttccatcaacactttgttatcctctataaatccattcttgactacataatcgactataagtttaacaaaatgtatttgcttagtattaaaactcttattatttaaaaactctgaaaaagcttcatttgcagcttctctatccaatcccactagttttctcactaattgacttactggagtatctccaaactcctttttataatcatcacaattacctaactgctttaagagtatttcctccaacgtttcaacatcttgctttgttatctttttattatttcttaatttaaatattgctaattcatctttatggctatttaaataatactctaccttctttttataattcttaagattgtttgcattatatacagaatcatttctatcttctgctacaatcatatcttcaaaacttgtataatatatcttttgactagacttttcaagatacttaataagctctcttaatgatatacgtacttcttctacctcaaatatatctgaatcttcccaaaaatcctctgtcattgctttttcaatagtatatttttgttgctggatctgtggtatagtcccaagtttcgaaagtttttctgctgtaaccattacatgccttatccctttacttgcattattattttgtaagtatgcaagttgtatattatacataactacatcaaatcttttagccaattcatcatcactatatgaagttatgagtggtgatatatattctcttatctcattttgtgctactgctccaatattgctccaaacattttcatttttatacttatgtacataacttaaattcatcctaactatataactatcctcatttaaagcttttacagaagttataagttcttctaacaattcttttctaagttctgcatacttaccttctatatatttaatatcttgaagttctttaaccatacttacctttatattaaataatttttcagtaagtgtttctgctttatttccctcaaatcctttaggattaaatttaaaaaattcaaaattattacaaaaatcaaatattaagaatctttccttatccatatcaacacctaataaatctggacataatctagttcctctacctatcatttgccaaaacttagtcttacttctcactttcttgaaaaaaacaagatttaggatttcaggtatgtcaattcctgtatcaagcatgtctactgaaactgctatttgaggtaatttattcttatcagaaaaatcatctattatagaatctacataatttatactatagtcaactgcttttacaaagttcccaccatactttggatacagtttattaaatctttcaactattgccctagcatgctttgtattctttgcaaaaattatagtcttaccaatcttttcttctccttctattttcaacccctctgtcattagcttatttaaaactaaatctattgtgtcagaattaaatagccactcatttactgcattattccctatttcgtctccaatactctcatcatcattaaatgtattttcatattcttccttctcttcatcagaaagctcatcatacttaattccatcttccataatcttagtcttaaactcaatactagtataatctactaaatatccatcctcgactgctttattatactcataagcatatgtaggtactccattttccatgtcaaaaactgaataagtatttttatctatctcatcctttggtgtagcagtaagacccattaagtaagaatcaaaataatcaaagattgacttatactttttataaatacttctatgcgattcatctattataattaaatcaaaatgaccaggtgtaaacaatctctttccatccttagacttcgtatcatcaattgcattcatcattgttggatatgtagaaaatatcatcctagcatcttctgggctgtctttgctatccaataaattacataacgccaagttaggtaatagcttagtaaaactttttttagcttgctttaccaatgcttttctatctgctagaaataatatatttttaatccaattatgtcttgaaagtacatcaactatagatatagcaattcttgtttttcctgtaccagtagcacataccaaaagagttttgcgttgcttattttcaagagcctcacatacagccctaatagcttctttttgataatatctattggatatttcatcatttattgttacagaacttaaagacttcttactctttcttctatctatcataagttgtaattctgattttttataaaatccataaacttttctatctgaatagtcatcccaaatatacatatcaaaaccattcgtcaaaaatattactggtctttgactatatctcttttccaaacaatctgcatataatttagcttgttgttgaccaattttcgggtctttgctcgttcttttcgcctcaactactgctaatggcttaccattttcaccataaagaacataatctacatatcctacaccactttcattaggcataccttgtacttctatttcctcccctatatcttttccaaattcccaacctgcaagctttaattctatatttatatatctttttcttgtctcaaattcgtttacttcgtctatcttgaaatcgtagtttacagtattaacttttctcttttcagttagtgactttcttaatttctcattttcttttattacttcttcaagctttttatcttttgaacttaatctctcataaagatttttaagctcgtctggtctcgtccttttctcttccccatgaagtaataaatcttcattaaagtcttctgctgtatattcatctgaataacaatagtctatccaactaacaaattgatgcaaattgttaagtgaaagtattgcttctcctctctctatgttcgcactagtatgtacagataaattacctaatttaactatatattttaataaaggtaacatatcatagtctataagttctataaaactattattatgaatcaacgtactaagattatcttgataaggcaatactaaatcactatcattagcatatagccattttactgcaagctctaaagctcttcttgttatagttgcacaagtagatgggctaactagtatacttttttctgcttctaagcaagcagtattaaaactattgaaatttttcttcttttgtaaaaagtcaaaattacccaaggcttttctcccccttttgtcccttagttaaaataaatctctctaaaaactatttcttacagctgtttcttatactaacaaatacttcttcattttctgtaaacaattcgtacatatcttcaaactgtggtatatcatatccatgagaatcatcatttctcaattttctaagtgtttctataactatagaagaatttttaggtaataaattgtgatactcacaagctaaaaggtagtcataaaagtttttagattttatgtttaaatcaattgatttataatacaacattgcttttgttaattctaaaaatgagaccatatagcttttaaaaccttcttttatgtatctagcccataactcaggcatttcttccttatcatataagattttgaagttttgcaggtcatataagcaagaaccaaaatccctatttacttcttctattgagttccaagataatttgtttctaattaccatacatgtccctccaatctaagatatctattacatcactgttttcaaaatagaatttatttatataatccttaaaatctttagattcataaataacttcaccttctaaaatagcttttttaagtgctattgtataattatctgtaacaatttttaggtctacatcaatgtctaatatatttcttagagcttctgtcttagttgcaagttctgtaattggtacttttttgataggaatccaagctatgtctatatcgctttctgatgtatgtttatctgttccataactaccaaatattatgattgctagagtattttcttttggaaatacatttattattgagtttttaatctcatttggtatatttctcatttaatcacctcttgtttattaggtaatattgcttaattgaatttatatccataatcttttaatctatttatacatatttctctttcttcatcagtaaacaactctttatacttttcttttaatactaatacttctaatgataaatctaatctcttacactcccatagccttgtaaatccttcagtagctccttctttattgattaattctttagcagctaataaggctcctttgttatttatcagttgtaaaaatcttgttggcttatagttacattgtaaatcagcttctttatagatatttaccatgtcatgatataaatctagctctatttgattcatagattttattcccccattttaatacttgtatttcagttgaacaattctcctttaaaagctttttgcattaatgagttaaagttatcttctagttcttttaagctagtttccatttcaaacttcaaagagtttacttgtttaacgaagttggcaaattgattttgaagtctaataggaggtacaataatatttatttttctaacagcatctttagttatcgtttttgttacagctcctcttactttctcttttattttactttccatataggatgttagtaaaaggttatataagaatatatgattcactttatcttcattaaatctaagcataaattgattcatagctaaagatactggtttatttaaaaatggcattaaataaactttacctgcactacctatcttatttattataacctcaccaccaaacacctttgatttttcaagataattatatgcatgttcatcgatatacttaacacctttttcaaagttattattttctaaatctgtagttcttaccattaaggcataaccttttgtatctaaaagagttacattatctcttaaggtttcataactaccatttgaatgataatcagttaaaacatctaaatatttccctatttctgaaatttcccagtttttttcgttctttgatggggtaccaaacatctcaataaatcttgatttaactaattcatccaatacttctatttgctcttttcttttatctattaactcttgagccttgtctaaaacacgcactaccttttcttgcacttttaaattatacatgcgtatttttatattagctaatccttcattatttaaagctgattgtgtagcacctttacttaacctatttttttgatttagaaaataactactatttaagtaatggtataaatattgaggcaatatttcttttgatggttttaaaacataaaagccagtcgatactattatatttttattagttttattaataactagtgttttctttgtgtccttcatttttgcaaatataacttctcctatatttacagtttgatttgctctagaaggtttattttcataagtaactatttctagattgcttatcttgttaaaatctaagtttccagtactaagatatgagcgttctccatcaaacttttttacattttccctgcttatactaacaacatctaaaatttttgcttcatcaaccatactctacacctctaacattctttctagttcctctaatccatccactatctctttctctaacaccttaaccctacctataataacactaggagcatcataaactacttcctcatacactacctctttatacttattaatagataaatcatacccattctctcttatctcttccacatcaacaaaaaagctttgctctgttctttttctatctacttccccatcaagattatcaaatctcttaataatatcctctatatcactatcctttatctcatttctcttatcatccaaagaataaccatcagctttcatatcatagaaccataccttatcagttccacctgtccctgttttagtaaatatcattatagctgtagatacccctgcatatggcttaaatacaccacttggcattgatattatagcttccaatttatgattatcaactatttcttttcttatcgatttatgtccacctgttgaaccaaacaatactccatctggcactatacatgcgcatcttccaccaatttttaaaactcttaaaaaaagtgccaagaataataactctgttttctttgtcttagtcacttttaataaatctgctgacactgcttcataatctaaacttcccttaaaaggaggatttgctagcaccaatgtaaacttatctttatctgtattaacctccgataaagaatccttatactctatattaggattgtcaacgccatgcaacatcatattcatagcacctattctaagcatagttctatccatatcaaatccatagaacataccattattaaaatgctccttcagcccttgcactaagaaaagacttgaatgattatcccttaagtactgttgtgatgatactaaaaaacctgccgaacctgctgccgggtctactataatatcttctggtgttggtttaataagtcttactatcatatctattatgtgtcttggagtcctaaattgaccattagtacctgctgtagccactttggataataaatactcatacaaatctccctttgtatctctatccttacttaattctaaattactaataccatcaactattttagataacataagaggcgtaggaattttaaatattgcatctcccatgtactttgcataagctgattctttatttccatgtaatttttttatgaaaggaaacacttcattttgtactatttcatacattttttctgagtttccttcattagaaaacttactccatcttaaatgttgatgttcatcatcaaatatcttttcaaaagaaacacccaaaagagttgcttctgcttcattttttgtttctacttcatccaatcctttaataaataaaagatatgtaaattgttctataacttctaatggattagttaatccaccagtccaaaatgtctcccaaatcttgtctactttactccttaattctcctgtaatcatatatgactttccctccagtgttcataaaataatttaaatatatattttagtcgtacgccttaatagttagtgtcttatgttaaatccaagtttttactacacaattattaaattatttttcccatttacatattttagctaaaaaactaatgcaatactcttattttatgattattatatataccatacaaaattattttatcatatatccatcatagaagtcatctacctggataactcttaccatattataactttttaatattaatttaaacttagaaagaaattttttatttaattatatcatcttccttatttcaaatttctcaactacaatcctaatcaaaaaataaaataagatgctgtctcaaaatagatataatcttcttttttattgtcagaatgatgaaaatatatttgatttcacacaaaaaagagtgcctcatgaactaaaaagttcattttgagacaccccttaatttaatcttacttattctttccctttattattaacacttcactgtccctattgcttttcctacacatccacaaacttccatcctactcttaacaaaatctttaactgactctaaaccttttttaccatatttcttagggtcaattacctctgggtcagaattaagcacatccttaaccccattgctataagcaatccttaattcagttgcataattaactttgcaaatacctctttttatagattccttaataacctcatctggtattccagacccaccatgtaatactaatggaactgatacaacctctctaatttcagataatctatctaaatcaagctttggctctcccttatatagtccatgtgccgtacctattgctactgccaaagatgatacccctgttctctctacaaactcttttgcttctaatgggtctgtatatgctccaccatcaccaccatctaaatcgtcttccttacctccaactttgcctaattcagcctcaacaggtatatctgaaggcatacatgcatctacaacagatttagatattgaaatattatcttcgtaactttcatgagaaccatcaatcataatagaagtatatccaactctaagtgcctgcatagctagtccaaagcttgaaccatggtctaagtgcattgccactggaacacttgccttctctgatgctacctttacattcgctaaataataatctagccctgcatactttattgttgaaggtgttgtttgcaatattactggtgatttaagttcttcagcagcctctattactgccataaccatctccatattttcaacattaaatgcacctactgcataatgcccttcttgtgcatctaataatatttgtttagttgtcactaatgccataatttctcctcctatatgtttatactgatttgatttcttcgttatttaattttgatactatttctctacttgttttgctatttaataactcatttaaaaattcttcattcattaattttgaagatagttgagataatgtttttaagtgtaaattatcaccattatctgtagctgatatcataaatataatatgtgccaagcttccatcttctgattcaaagtcaaacccttcttttgatacacctactgctacacgtggtacctttactgcatctgtttttgcatgtggtatcgctatccccataccaaaacctgtagatgatatttcttctcttttaaggatttcttctttaaacttctttttatctaaaagaacaccagatttatcaagtattccaatcatttcatcaattacatctgttttattttttcccttaacatctaaaattactgtttcttcgctatataaagagatattattagatacgttttccgattctgcactttcatttttatgtccatcttttgttgcatttgtattttctatagtatttttctcatttactactttaggtgtaaccatcatataaagtacagcacctactaatgaacctacaaatatacaccctacccataaaagtggcttattgactaatcctagaaccaaaaaccctccatgtggagctggtacttctattttcattatataagttaaaattgatgatattgatgatgcaatcataagtactggcaacacttttaatggattttttgctgcaaaaggtattgccccctctgttatatgagtactacctagtatataattgattaatcctgctgctctatcttcttctgtaaatctatttttaaataaagtagatgctattgctattaccaatggtggtgttatacaagctgcagatacacctgccataaataaataatttccctgtcctagaagcatagttccagttacatatgctgctttatttactggacctcccatatcaaatgctgacatacatcctattactattcccaaaattataggacttgaattttgtaaccccgatagaaagttcatcatagcattgttaagtgctgaacatggtccaccaagtaacaacattgctacacccacaagacctacgctgacaataggaattataaaaatcgatttaagaccttctaattgtcgtggtaattttcttaacaaatgtacaaatagtttaactaagtaacctgctaaaaatcctgatatgattccacctaaaaaccccgaacctgtatcaaatgatatcattcctccaacaagtcctgccaacataccagctcttcccgatatagattgagctataaatgctgccaatacaggaaccatcaagttcatagaatatccaccaacagattttaatgtagctgctatttgattatattgttctgaatttgggtcaaatgaataaatcccccataaaaatgatatagcagtaagtactccacctgctactactaaaggtaacatgtgagatacaccattcattaagtctttatacaacttttgaccaaacgataaatttccttcttctgcaattttactgcttgataagtttccttttctaatagctacttttccatcaatacacctttgtataagttcattagccttatgtataccttctttgacaggtacttctattaccggctttccattgaatctgtccatatcaacatttttatcacaagcaactattattgcatctgccatttcgatatcttttgctgttaacttattttctacacctatagctccattcgtctcaacttttatgtcacaccctaattcccttgctgaattttttaatgcttcttctgccataaaagtatgagctattccagttggacaacctgttacccctagaatcattttctttcccatctttataccacctttctgactcttatattttttatataatcttccacattctccaaattacctataccattactttcagccacacttgctcctgttgctgctgacctttttaatgcttcttcaatatgttctggattttccaaccatatacttaaaaaagcagctaatgcagaatcaccagcacatgcagagctgactactgtaactggttgagcactagcataataaattgattttccattataaaaataagaacctttttctcctaaagttagcaatatattttgagcaccttttaaatgcagtaatttaagtacatccttaatatcttcttcatctcttacaataattccaaatatatctttgatttcttcatcatttggttttatcaaatatggattatactgtagtaactcctttaattttggtgaacttatatcgagtattgtctttatacttttatttttacaaattttaaatatatcctcatagtaattatcatcaataccaggaggtagacttccacttattgataagtaacttatatctgctaatgactgtatcttatctagcatatctagtttttgtttttcgtttacatatgacccagagtttacaaatttaaattcatcacttccatcatttaaaaatatatttatacgagttgtatcttctacccaagtaggtaatacgtcaaatcctctcttttcgctttcttcaactatatattttcctgaaaatcctccaaaaaatcctaatatcttagattctataccataatgacctagtacaaaagttacatttaatccctttccattaggagaatatacagcatttgatgtacgatttactaattttctctttatcccattagtagatatattcatatctattgcaggattcgtagttaatgtatatatcattgtcttcccccttgcttgtgctgtgtatgttttcattataataaaaaagtctatgaaaatcttttcacaaatagaaaatcgattttcatagacttttcaatttaattttcagaattattatatctgaccatataatctataattatcctagatataatatacaagggcaatctggaagatacttcatattcagaaattgatatatgttcatgtttgtatcctacaatatataaatccgaatactttataagttttgcactttcactacaacagcaagttataaccttagctccaactaaattggcattctgtgctgattctacaagctctatggtatttccattcaatgaaaatatgattataagttcgtctttttttattgatttagattttattttcattatgttggggtcatttataaaaacaacattaaaatcaagtaattgcaatttaagactaaactcttttgctacatattcagtaagccctcttgccaaaatatatatcttactagatttatttatagtttttattatattgattagtgtagttaaagatatttgttctataactctctgtgcttctataaaggatttatttattatatcccccatattttgtatatcatcattttcatcttttactgttaatctatacctaagttcattgaatccatttaaaccacattttctaattgctcttgaaacggttgctggagatgaatatgtttcatgagcaatctctactatagataattctggtaatattgattcattttcatttataaatttaattatttcaagttccgtcttcgttagattttcagaattacttttgtttagctcaattatcatatgttatctccccttatataagttttatttgtctaaatttatcgagtaatataatatattacctcttaactacttatttttatatacaattaagatttagtcaatgtctatatatgtaaatttataatataataattttatgcttcaattaattatgtaattattagagtattttgtaataaaaattggagttactcaattactgaaactgagtaactccaattcttacagcctcaaattaactcgaattattgaaaatgattcataaacattatcctatactctcacttatcaatttatatacttgagtaatacctttttttattaacagaaatcatcttactaacaattgaaattgtagttccagtacataatattgaaaatatagttccaaaccctaaatttccgcctaaatatacacctaaaattaaaaatattaaatctgctatagtttttaaaactttatatggatacttaaatttgccctcaatatagattaatatagcatctaaagggctcattccaatgtcaaattttataagcattgcaaatccactacacataagtatatgtccaattataaagctcattattctaatgataatccctaaactacttatattaaaatctaataataaatatatatacaaatctataaatattcctgctactaatacataaacacagcttcctaatcccaaactttttttattcaataacaatgctataagtaatagagttccattatatattagccctgctattgtataacttatacctaactttatatgtataccctcatttaaaagtgtaattgcatcactaccaaggcttgactgaagtataagagatataccacatcccagtatatttataattaaaattacaaatataaatttttttatgacattcataattaataaaccaccttatttataattataatccctcttataaaactgtattaataacatagtatttataagagggattatttatatttaaaaactatctactttttcttttaattcttctccattagttcttattacatttttataccaataaaaactatcttttttgtaacgttctttgcttccatttccattgttatctatatctacatatataaatccatatcttttttccatttcttgagatgaacaacttactatatctattggcgaccacatacaataagctaatatttcggttccatcagctatagcttcacctatttgttctatatgttttcctaaataatctattctataactatcatgaacttttccatcttcaaatttatcatgcattccaaatccattttcagctatcattattggcttttgatatctatcataatattgagataaagtattgtataatcctttagggtcaattgcccacccccaaggatttgcttttaagtattgattttttacattatcaattggattcatggtatttttacttgctgatactgttgtagagtaatagtatgatagagctagaaaatccatagtattctcttttaacactttatcatcaccttcttccataactatatttatgttattttctttgaagaatctcttaatataagctggatactcccctctaaaacttacatcagtaaaaaaatattgtattctatttctttttaaagcaaatactacattttcagggtcgcaatcttctggataagatgtacaatctgccatcatcatccctatcatcatatctgaatttatttcttttccaagcttcttagttaaagctgtagccatgaattgatgatgaatagcttgatatttggcctcttctacatcatctacctggtctacacaaaatgcaactgaattaaatgattcatgatacattaaatttatttggtttataactatccaatatttaactttatctttgtatctatttaatattaattctgcatatctaacaaagaaatccactacttttctattagaccatcctttatattttaatactaaattcaaaggagtctcataatggagtagtgttacaataggttccataccattatctattacttcatttataagattatcataaaactttaatccctcttcattaggctctaaatcatctccatttggaaatattctagcccaatttattgaaaatctaaaacactttaaccctagttctttcaaaagctttaaatcttctttgtatgtatgataaaagtctattccattacgcttaggataatacccattattatctttcatagcaaactttattttatctacagtcatatcagactcgtaatgtttagatatatctctatctttatcatacatatgtacatcagctaagcaccaccctttgccaccttcattccaagcaccttctaattgattagctgctacagctccaccccacaaaaaatctttaggaaacttactcaatttaatcactccttattttatttatttaaatcatttactattatttaccttatattctatagactttactattcctactaaagacatagttatatttaactcgctgaatattgtcataagagtatcttgagcatgtgcaaataaaagtgaatgtgctcttttttctccactagcttccccttgtataatgttagtttgagctctatgtgcttctgtcataaactcttttgctttagctagttttaaatcagcatttttataatcaaacctttctaaatcattaagagcatgtttaatttctgttctagcctcacctgcacgaagtattatttgcattgctacttctactaattcttcatctattacatgttcttcagttgtcatatttataatttcctttcaacatctaaatttaagcttcttgactctctaattttagttcttctttttcataagctttaaaaaatggataccatatcatgaatagcaatactatatttattgctaaaacaataagccctctaacatcttgatttaccataaaagtagatataccaaaaggaagataccataaattaaacaccttactcggaattgtcacaaatcccatactcattgataagtaagtagttattgatattactactgttcctatccacataggtaacattaaaaatgggttccatgctactggagctccaaacattactggttcatttatgttcattatagaaggaacgatacaggctcttccgattgcttttattcttccagctctagataaacacatcattagcactagtggtaatgttgctccccacccacctaaagttatccaacctgtttgaacaacttcataagtatatatattagttgcaagccctcctgatgctacagctgctgcattagctgcaattgcactaagctgaattgcataagttattggggataatacccatccacttatacctaaagaatataaaaatactactaagaagtttaatagtacaaatccaggcaatgtttgtgctatatctgatactggtttaaatatcctaactattatttcaaacatatcaaagttaagtccataaattagtccccaacctataaacattattactgctataggtaacatactatcaaaccacttacttacaaaatcaggaagtgctgaatcttcaccaaaaaatgagaaagacccaaataaagacattattaatccggagaataatcctgcaactagtgctacaagcattccttctcctccaaatctattgaagttaaatatagctccttcattcgtaatctctggacgaatcatcattaacattaatccagcacctgcaagaccagctactacactcatactttcaaatttcttattcttcattatttccataggtaataaaaatgctataaatagtcctaaaagtccaaatgtatattgatttattggacttaaatcaggtaagaaacttatgtaattcttcaagacagaaactatagttactaaagaacctacaaataccataggcaaaactttcattatagttgattgaactgattgtacccatatattcttagttatcttatttacaacaggagtaaacttttcacttaacaaatctataaatttattcataaacaatctccccatagatattttatttgtttaatattaattctaatgcttcttctaaagcctttacaccatctaatcttccatatgctgttttagatatacatgctactggaacattatattcatcagcttttttttgtatttcatctttcatataatctaaatgtggtcctaataataaacaatctatttctggtaaatatttatctatctctgactcacttctagcttttatatctgcttctatgccttttttctttgcactctttctcatactagttgccataaaacctgtacttgctcctgagccacatgccaacaacacttttatattcttcataacaatacctccagtatttttattcattaatttatttcttaatgaatttttatttgatttgattgtatttatattgtacttcctaaataatttcctttcacataaatatatttcctaataataggaaatcatttactcttaaccagacacataaatatatagtataatgtacattataatacgtacattcaattatataaatatcatatcatacagattttattttaaaactatgagagggaatctaatgaaaacatctaaaaaagagttatttttaaacttcataaaaacgcaacatgattggatagattcatccacattagctaattatcttaatgtatcaacacgttcgattagaaaatatgtaaatgaaattaattctactggtgaatttatattatcctctaaaaaaggatataaagtaaatctcaataataactgtcaaaccaaggttgatagttcagaaaatatatcacctgataacaggttaaatttaattttaaaagaacttatagttaatagtaatggaattaatatatttgatttaagtgaagaattgtttgttagtccagctactattgaaggggatatagtcaaagctaataaatttataggaagttataatttaaagataaagcaatcgaaatttttattgaaactaattggaaatgagtctgcaaagcgcaaattaatgagctctataatatttaaagaaacgggaagtgattttttaagcttatttgatgtacaaaaaatatatcaagagtataatttgaccaaactgaaagaaaatataatatatatattaaaaaaatacaatttgtttataaatgagtacgctataaataacatacttcttcatttaatgataactatagacagaataaaaaagaataactacatagaatctgtcgaagtagtaaactacatagataataataatgatataagcatttcaagagatatatcaaattttttagagtctgaatacaatttaactttaactagtgcagaattatactacttagtatttcagttaacaaacaaaaccacagtcttaaattatcatgaaatggatactaagtcattgccaaattatatagatgaacattttgttaaattaactaaaaaaataattaaaaatgtatatgacttatactttatagatttatctgatgatgaatttgttgtaaaatttactcttcatgtaaaaaatttaatcagtagggctaaaaataatcaagttttgagaaatcaaatacctcagaagttaaaagattcctaccctctgatatatgatatatctgtttatatttgtaatcaaattcaaattttagaaaacatagaaatagatgaagatgaaatatcgtatatatctcttcatgtaggttcattttttgatagacaaaaattactagaagataaaattctctgtgcattaattactccaaattactatgatttacaattcaaaatagtaagagacctcgagaagagatttaatgaatccatagaaattattcaaattttttcagatactcataatcttgattttgacaataaggtagacatggttattactactttaccaattagtgatagatgccctataccttttgtttatgtaaatccttacctaaacagaaaagattatgataatatccaaagtaaatttattcagattaaagatagaaaaaatatacttactgtacaaaatcatttagaaatgtactttagtgaatctttgtttatgaaaaacatatatttagatagtgctaaagattacataaaatttatgggaaatattctgtacaaaaataaatatgtcaaacccaattatatagatgatgttcttataagagaaaaaatgtcttcaactgcatttaataacaatgtagcaattcctcatagcatgaaaatggatgctttaaaaactggagtatgtttaattgttaacgataaaccagttaaatggggtgaggaaaaagttcaaattatagctatgatacctataaatgaaaaagaaaaagaaaaattcaattacatatttgaaagctttattgaaatattatctgagtggaataatgttaaagaacttactaaggcagataactacagtagttttatgaatagaatagcttatcttattcaaaatatctaaatccattaatttatttccaatatatgtttcttaagttattaacacaaaatagataagctgtcacactaaaaagtctaaattaatatgtgacagctttttacctaatatactttgctttaatactacatattttttgattgttgtatactagttataagattgaatatttgtgttgttgtagctgtcatattctcactagcagttgctttatccattgcttcttctattgtcatagctctatttactatagaaaaataagcatctataccctcttcattacatttaactgcatcttctgttgtggctccagccaaacctattacttttaccccatatttttttgccagttttgcaactcctattggagccttgcccatagcagtttgattatccaatctaccttcaccagttatgacaaaatctgcatcttttaactcttcctctaatttaatttcttctaatattatttttattccagattctaattttgaatttaaaaatgctaaaaaagcaaaacctaatcctcctgctgctcctgctccttctacattagctacatctttacttaagtaatttttaactactttggaaaaatttctaagcccattatctaactcctcaattatttctgatgttgcacctttttgagacccatatatgtatgcagctccatttttcccaaacagcggattatttacatcacaggctattttaaacttacattcatctaattcctttaatctattttctatttttatatgtcttatttcatttaaaacttttccacctaatcctactaacttgttattttcatcataaaactcaaaccctaaggcttgaagcatacctatcccagcatcattagtagcacttccacctattccaactataaaatttctatagcctttatttattgcttcctttattatttccccaacaccataagttgtagtgtataaaggatttctaagttcagtcggaaccaatgttaatcctgatgcttgagctatttctattattgctgtacttgtattttttaataatccatatgttgcatccacttttttagctattggtccagtaacttctatagtctcttttttaccattcatcccttgaactaaagcatctactgtcccttcaccaccatcagcaagtggcaatatctttacttgcgcatcttctttaaccttcaatatccccttttttattgcatttcctgcctctattgaagataaacttcctttcaaagaatctatagaaattaatattttcatatttatctactcctttttatttactctttattttaaatatataattttataagcttaatttatcttttattttatactctatatttcactttgtatacaacttatacccttaatattcttttatcttataaaaaagggagtgtctcaaaatgaactttttagttcatgagacactctttttgtataaaattaaatatatgtttattatttcaacaatgataaggaggattatctctattttaagataattcctttttagcactatctaatcatttttagcactatttaaccaatatagttttaacttggttcattaggcactctacatttacagagttattatctattgatatagattctaattctttttcatttaggttagtccatttagctgttttaatatttttgttaaatactacgttagctgattttgtttcttctttagaattgtaaaatctaactactaatgcctcttctttttcagccttttttacaacacttaacacaaggtccttattagtttccttaagtaaactatatgaataatctacttctatttctgattgattcaatttcatagcattatatggtattttattataagtttgtatttttgttaaatactctttagccatatttgcaacatttgcttctagtgtagatttttcatgagtgactattgctaagtctatttttatatctcctatcatttgagaatctggagtaggcaactttattcctgatggacgacctgggcgtcttgccatttcttctttacctaggaatcctacacttctaaataatgttatagctattgtgtcaaattttttccctactatttcaaactctcttgtactgtttgtaagaacagctactccatgctctttgtcagacaatccaacgaatgttagcattggatatatagaatctggtctttcactccattcttcctgttgccaaacttccatagcatcatcatacacacttctctttatatgtccaaactgattatcagacacagaaaactttgaagctatatttgttggtatataagttctaaccctacaatctcttgcttggttatttatattgaatactacatttattatagctttatcatttggaacatttataactatatcaaagtcaataaatgaatctgctctattattttttctagcttgtatatcttttggtacttttaatctataatttatctttatctcattattaaatctatttttctttatagtggaatttgctactatattatcgttaaatattaatttctcatttggaagtggtgaaaaatcatactcatctccttcatctcctccattttccatcaataatacattttcaaaagttttatttaattttttatcagatatctttaatgtcccgttttcattaacttgaatagtataaaagtcattatctaccatgtcacatacttcataagctttttctaacatatgttcaacttcttttatcatatacgccttataccccattgcaggtattttatctttaaagtttattgtatataccataaatgaatcatagtttccataatgaacaatttgacggtctattaatcctgcatctattacttctttatgtaccacttcaaaatccaacttattattatctttatcaaatatttcaaatgctttcattttagttataacttgggcgttcactatttcattcctattgtaaggcattaagttaaatgctactaacttatctaaagccatttcacaactcattgcatcaactattcttcttttgtaaaatgttattaattggtctactttttcctcagctaagaaaaatctattcattatttcctggtgaactttatctgaacaacaacatccaatgctgtcatgagcatgatttttcattatttctttccaaattaactctattaatccatgatgatattcaaatcctagagaatatgcaatagaagctagtggctccaatatgttggttatctttgattctattctagcatttgctgattttatatccattcttgttgagaatatacttctatgaaccctcatatatttcccatctaaaaattccccttttattgtatctatatccttatttttttctagctctttaaatatgttttcatatctacttaagaaaaattttctctctggataacattcttttaatttatatataacttcaaatatattcttttgaattggcatttggtcatgtccatttggaagtattatatggtcagtagttgcacccttatcaagaaccggtaaatatttatccattcttgttcttagctcatcttcattcattggtagatattttcctattgcataacctaatggaagtatttgaaccaaaacagaagacccatcatcactcttccaattaaactctgttttattagttccttttctttcagaacatcctctccaaaacattgagtattttatatcaaacccatttagtatttgcggcatttgagcactttgaccaaatgaatctggtaaatatcctattttcatatattctccaaattcatcacaatcttttattccatacagtaaatttctaagtatggattctccaccaactaccatttcatcagtttgagtataccaaggacctattattagccttccttcttgaactaatttttttattctctccttacattcaggcttaactgctaaataatcttctaatatagcagtttgaccatccatcacataatatggatagttatgattattttctaacatatccattatttcttccatattatttacaagtaatattctagattcctcagttgagaagtaccattctctatcccaatgcatatgaggaactatgtgtacattttttttcattgcttatcctccaaaacttatctgataatattttctgtctaattaaaaatccaataaaaatactactgagtttacacaattttttaatatttattttatcactataattaaacctttgatttaaatatctaataacgtatcttttaatgtatctttctttgatttttttgtttcctagttattattaataatattgctgatattatagctccaagtactgccgcaaagaaccatattgatgctataataaatcctgacatacttccctctaaaagcgccaatgagaatatccccgctccaggcacttgaagacctatattgaagaatgctactatagacccagttatggctgaaccagctactaatgatggtataacatggattgggtcctctatcataaatggtattgcaccttcagttattccagccaatcctaatatccaagtttgctttcctatttccttttctgattctgaaaataaatctctgcctaaaacagtagctattgtaactccaaaagctgagaccatcttaactgatgcaaatattgcataaggtataaaatttccacttgctattgctcctattgcaaatgtataggctgctttatttattggtccacctaagtcaaatgaaaccatagctcctattattgcacctagtagtattgcatttattccagtcatcccatttaaccaatttataagaccattgttaagtgctgctacaggctttcctattacaaataacatcaataaacctactaccaaagaaccaactactggatatacccaaaaacttacgaatccagctaatgtgcctttggctggtatattcttctttaaaaattttactatataaccagcaagtaaacctcctaacatacctccaagaaatccactacctattaaatcagctgctagacctgctgcaaatcctggtccaagacctggtttttcagctagtgagtaagacatatatgctgataatactggaaccatcaatgtacctaacatccctccagaaagctttcttaattgccataaccaagaaccttcttgattgtatagttcttgtaaaccaaatgcttgagatgctaatactgcaaatgcaagtatcatacctcctgccacaataagtggtattatatgagatactcctgtaagtattgctgattttacatcttttttccatgatgatttttcacaatatgatatatcagatgatttttctatataatcacctttaccttgtttttgtgctacttctaaagcttcgtatattatttcttttgccctttttagtggagctgctactgacgtttttatgtttggcaaatgttcaaatctttctgtatttttaggtgctacatctgttgcatatattattgcatctgccttttttattatatctggtgtatgagggtccaccataccattagctccttgcttttctacatacacatccacacctatttctttgccagctttaattaatgcttctgctgacatatatgtatgtgctatacctgcagggcatgctgttattgctaatacaattttttttgattcattttgaatcctaatctcttcttttatttgttctttcttttcttttatatctaagttattaaataactctttcttagtttttgaatttaacaacatattcatataatcttcattagacagtctagtaactaactcagaaagtatttgtatgtgtgtatttccaccttcactttctggtactgctattaaaaatattagctctactttattatttgagtctacgctttcccaattttctattggtgtctctaaggtcatagctgcaaatgcagcttctttaactgacttagattttccatgaggaattgcaagccctctttcaaaacctgttggagataaagtttctctgtacattacagcttctaaatattcctcataagatgttaacttgccttcatcatatagctttcttgctaagaactttattgcgtcttcctttgtttttattttttgttttaaaaaaacaaggttttcatttgtgattttcttaaattccaaaattacgacctccttaaatcatttaatgttatgaatatagcataaaataaatcatgaaaatgtttttttgaaattatacacacaatttcttcttaaaaaataaggatttgtgtatttatacacaaatctctatcttaaccagtattgttctattattgctctcataatcatcataattggaaccttatctgatatattgtacccatttacttgtttaattgttgaatagcaatataaacttatatctgcaatttgttgcaattgattttcacatatatgtgttagagctactaccttacaacccttattaactgctgtctttgctgcttctataacttctttcgtttctccacttaaactaagcgcgaaaaacatatcttgttcacctaattttcctatatcatgaagtacttcatgtctttggctatagtaagttatattatcatgcccacctctaatttcttttactaatatctcacataaaggaatgttttgacctattccataaactataatactcctagatttttgaattatatctgctactttatttattttttcataatctattagctctaatgtcttttttatatctgattcaaaaccattttttggctctttatcctcattttttaactcttcttttaaattgttttttagttgagagaaaccatcatactccatttttttacatagcctaactatggtatttgggacagtaaaaaatttatctgctaaagattgtattgataattttactatttcttctttgttttttctcatatactcaattatcatgtcttctgtatctgtaaatttatactcatatttttttgctctttcataaaattccatagtttctcctccatctattttattattcataagtaaaattcaaaaatattagctaaaattttcgttaatataattataatttaatatttttaatttattaatgcatactactctttttattatacataaaaaatgtgtacttcctatattgatagagatgattcaggtttttattttgatacatctctatcaatatttttttagaaaatacacatttttttcaaatacttatttttaattaaaactttaggtaatctattctttatatataattattagacttgaaaatatctttaaaatcaaccaattcaatattatttctttttaaccacattttaacttccttatcacatagcattgcatgttcatatactctctcttgaataagagaagatgattttataagactataatctataaatcctggatgagtaaccatcaatgttatatctttatctaaatttatatatttttcttcaaataatttaacaaaagatttatttaacttgtaaaaatcattctgaggatatttacttggcatgctaatacatgaatctaaataatagggacaacttggtataccgtattcttttgcagcatcacacattgctgatattgatacatcttcttctataccatgtatatcaatatactcaggcaatttactcatatacaacttgtaagtttcaatttgagcacaaacttcttcatatacttcttcataattaaaaacctctttacctgtcagtagttgcgttcttcttattttgctagaaacaaattttccaccttcatctaacaaattctttatcttaatatgttctttacaacaaggttctcctattactaaattaacatgtaaaccaaaacatacatcatcattttttaccatttctatagcttgtcttgaaaaaggcatattcaccatgattccagcacttgtaacaataccgttcttataagaagatattatccctagtgtaacaccttctgaatatcctatatcatctgccctaactactaatttcttcattttatgcatctgcctgctttctcaactcatcaagttgcatttccatctcatcctttactttaacaacatccgttcctatgatgatttgaactgatgtattactcaatttaattacccctttggctcctgtttttttaatattatcatcattcaaaatagtggcatccttcacttctaaacgtaacctcgtcatacaattattaagagtcactatattttcataaccaccacaatttttaattatctgcttagccatatatgaaaaattaccatgagaaagttttaaattcttttctttttcactaactttatcacctatctctatctcaacttcatgtcctggtgtttgtacattatcttttattattatatatttaaatgttacataatataatacaaagaatacaactcctacaggtataactaaccacgctttatctccataactaaaacttaagacatagtcaattatacttgctccattaaatgaacccaagcgagcacccagtaaatatagtacaactccacctagaccagaataaaaagaatgaattatatataactttggagatgcaaataaaaacgaaaattctattggttcagttactgttgccataaaagaagtcaatgctccagcggtcattgcaccttttacttcttgcttctttttatcttgtgctgttttatatatagcataagaaatagcaggtattgaaaacatcataattatgtaaaatcctgtccagaagaatcctgcatttgggtctcctgccataaatctaggaatttctcctcttataacttctcctgttgatgttgtatattcacccatttcaaataatatgtaagcatttaaaacttgatgtaacccagttggtattagtgcacggttacagaataaaaacaagaatattcctattgcaccagctcctcccaaccaaaaaccaaattgattcattgcagcttgtggatatatccataataaactaaatatatatgataaaattaaagcaaccactggtgatagtgtaattacacatttttctcctgcaaagaagcttaaaaatgctggaactttaactttatatgttttattgtaagtccatgctatacaagctccaacaattatcccaccaaatacacctgcatttaatgtatcattcaataactctaaatttgacttaaatatcatatatgcaactacggctgcaaccattacacttgtcttgtctttagactttgaataagcactaactgctcctaataaaaataagtagtccacatttgaaaatactatattagatatattagatatagctggcacattaagcatatttggaccaaataataatcctaatatacctgctgctggcattacagctattggcaccagcatagtctttcctaaaagtgacagttgttgcatcattttgtttaagaacctcttcatatccaatcccctttctatttcggtttaattttttgtgaaaacgatttattcacattttatattttaaatattatatttatttaaacaaattgtcaatattttttattcattttatttttatcatttagtttcatatctaaatccttttaagtatattgctatatctagcctattttttaaatttattttttttatttttaaaatatgtttaaccatgtatttgaaacaacccacaaaatagttcaaatttatcctttttatggtttatataattctattttcactatacatgtctaaacacatttgatataatttgttcatatcagttcaataatattactaaagacctttaaggagggataggggtatatggctaaaaataaattttcagagatatatgaagtattgaaagaggaaatacttgatggtaaatatacaagtaatatgatgctgcctactgaacttcaacttattgaaaggttttcatgtagcagaaacactgtacgtagagcaatttctcaattaaacacagaaggatatgttcaaagtataaaaggcaagggtgttgtagtgttagaaaatagttgttctaatgatttttttctaaatatgcacaatttcaaaggtgtagaatcgattgtagaagataaaaaggttaatactgctactagtgttctccacttcagcaaaatcttaattgataataagttatctaaaaagacaggttttaaagttggtagtgaagtatattaccttcacagactaagatatattgataacatacctaaaattctcgacattaactattttctatgtagtatagttaaagaccttgatgtttctatagcacaaggctctatttataaatatatagaagagtgtataggtacaaaaattgtttcatccagaaagatatttaaaattgaaaaagctacagagcttgagttaaaaacgctacctctaaatgattataattgtgttggtgttattaaaaatagtgtatatactgatgatggaaagctctttgaatatacagaatcaaagcatacacctgaaacatttgtattcatggatgttactcaaagatattaaaaaaattatgtttaattaaacataatttttttacgtttagacactttatcccatactaacctcactattctatatacaattatatgtttatacaaataattatttattgtatattttagctttaatattagtttaatacttgacaatttgtttaaacatattataattaacttataaattacaggaggtatcaattatgaaaaattggtggaaaaaagcaactgtctatcaaatatatccaaaaagtttcaaagatagcaacaatgatggtataggtgatataaatggtattatagaaaaattagattatctgtattctttaggtgttgatttattatggttgactcctatgtacgtttctcctcaaagagataatggatatgatatagaagattattataatatagacccaaaatatgggacaatgagtgactttgaaaaactcttaaaagaagctcataaaagagacataaaaataatgatggatatggtcctaaaccatacatctactgaacataaatggtttaaagaatctaaaaaaagcaaagacaatccatatcgtgattattatttctggaaagatgctaaacctgatggttctgttcctaataactggatatccagatttagtggaactgcttggaaatatgatgaaactactaaccaatattatttacatttatttgaagaaactcaagctgatttaaatttggaaaatgaaaaggttcgtgaagaatgttacaaagtactagaattttgggctgataaaggtattgatggttttcgtttagatgtagtcaacctactctccaaaacacctggattacctgatgaccctataacagggccaaaaggagatggaagaactcattacgctgatggtcctcgtatacacgaatatttacataatatgaatcaaaaagttttcaaacctaaaaatatagttactgtaggtgaaatgtcatctactacacctgaagagtgtatcaactatactagagaaaatcgagaagaactatctatggtttttagcttccatcatatgaaaacagattataaaggaggcgcaaaatggactaatgaaatgttctctctggataaattaaaaaaagcacaatctgactttcaatataaaatgtatgaaggaaagggatggaatgctctattttactctaatcacgaccaacctagagctttatctcgatttggagatgatagattttttcgtcaagaaagtgctaagatgttagccataacactatttggtctacaaggtactacatacatatatcaaggtgaagaaataggtatgacaaatgcctactttactaaaatagatgaatatgatgatgctgaaagtaagaatgcatactatcatatgattaaatctggtattgatgaaaaggaggcattgcttatacttcaacaaaaatccagagataatgcccgtactcctatgcaatgggataatactatttataaggggttttctaatcataaaccgtggttaaaagttaataatgacaatattagtgtagaaaatgagcttaatgattctcgttcagtattttatacttatcaaagattaatcaaatatcgtaaacaatatgatatttttacagaaggtacttatagattgttagatgaaaatcataaaaatctatttgtttatgaaagagagtataaaaaccaaaatcttcttgttataagtaattttactcatgataatgtagtatataaattacctgaaacttatttgaataaattaaactacacaatacttgaaaccaattacactagagatataattgaaaataaaatggaaataaaaccttacgaaagtataatgatatattataaataaagttatttatataaaaattggtataacaccagggtgttataccaattttactaaattcaaaataacatttatagaatatctatagattacaataattatttgacttctacatcattatatttctttgaatatactttagtcatatagaaatatataggaactacaattatcatcccacctaatccccaaactatcttcataggttcatcaatacctgcttttatcagtaataatatacttataataactgcaaatattggtataattgctcctccaggtattctaaaatttacatctttatcagcatacttctttctcaatattagtacagctaaacatgtaggaatatattgaataaatctagatacaacacttatttgagataatgttgtgaatgaacccgaccatgctattagtaaagttcctatgacagatactataattgctatataaggagctccatttttattagtttttcttatagacttaggcattaatccttgttcaaccaaagcagcagcagaccttggtgtaaatatggatgatgcaatatttatacctccaacagatactatagttcctattgtaattatatacccacctataggacctagcatcttaatggcagcatctgcaacaggagtagctgaccctgccaagccattacccaacacccctatacttattcccagtataagcatatatattactgatactacaaacattaccattaccaatgctttaggtacatttttcttagggttctccatatcttttgctgcaacagctaaagattcaaatcctgtaaaagcataaaataaagttatagatactgctacaaaagctgatgacgcactttgacccttttgtattattacaaatggggtaaaattagaaccctttataaagaataatcctacagctataaataaaactattggtaataattttcctatagtcatgatattatttaagtgcttagattgtttcattcccataaaatttataatcccaagtcctacaactaatataccaattattatatttttaataagtggttctgctgcttgtggccatacagatgatagtgttacagcaaaaaaatttgccatagtagcccaagcaatcatactaactatccacttcataaatccaacttcaaatccaacaaaatctccaaatgcctcttttgcataaagataaggccctccatcagtatcaaaccaactacctgcttcagcaaaacataaagcaatagaaacagctaaaagcatacaaaaaactaatactaatatacttgctggacctatatctgtataagcatcaccaggtaacccgaatatacctgaccctattattgcattgattcctaatagtacaatactccaaaaacctaacttaatgcctttttccattgttattccccccaaagccaacttaatatatttatattttttatttagatgcttctttaactattgccataaatatttttttcatattatcataatctctagtcatcatttctggatgccattgtatccctattacaaactcacttccttccttttctatagcttcaattaaaccgtctttagatgtagctgaaacaatatatcctggtgctactttgttgacaactaagtgatgaaaactattaactaaaacttctttttctcctaatatttcatataattttgtcccctcctttatctgtactgtatgtgtaggtacattagatagatgttgctgattgtgtttaatataagcaccttcaattaaagataaatcttgatacaaactacctccttcagttacatttataatttgttctcctctacatatacctaaaactggttttttcatatctaaagcatgttttaataatttcatatcaaaactatctctctttggtgatattgcccccaacttattatgaggttcttctttccatatgagtggatttacatcttgtcccccagatagtataagcgcatctatattagatacctgctcctttataatctcatcatcatatacaatcggtacaatatatggtatagctttacacataactactgattgtatataatcattatttacataagccctttcatagccaggaaacattcctccttcatcaattagtaaattacctgatattcctattattggatatttctttttaaccaatttcttcaccccttaacttatttgtgaacaataaaaaatgctacttctcttaaagagcaagtagcataccaagattttatttatttgaacattataattcattttagaaatactttttttgaatacaagtaatataaataactttatttacttatattttattttaatcctgtttagtttgacttttttaaattgttttaagtacaactaataggtaaaataggcatttagattttcctttttatcaacctattaaatactgtttaatatattttttccccttctatttaattcacttccctttctaccagattcacatattatcaaatccagctcttttaacatattaagtattccccttacctcaccttctgttatactgtagcctaattcatttattgaattaacaataccatttctacctatatttttattaagattattggcattttttaaacactccattactaactttactttctctatagatgttctatcctttaatatgcttatttctttactaaaatcttcagttatatttaataagttatgaggtaaatcatttattaaaataacatcctcagaactcataatgttaatatacatagcagtattttttaattctcttatattacctggccattcatatgcattaataatgtcttgaacaccttgactaattgctctcttccttttcataaaatgctttaacataacttctatatcttcttttcgctctcttaaaggtggtatatttatgggcaatacatttatcctatagtataaatctgctctaaatctatctccttttatcatttctaataaatttttatttgtagccgcaattactctaacatctatatctattacattttctcctccaaccctcattacttgattctcttgtaatactctaagtaatttgctttgtaagtatataggcatgtctcctatttcatccaaaaatatagttccattgttagcctgttcaaataatccttttttacctccttttaaagctcctgtaaaagcaccttcttcatatccaaaaagttcactttcaagtaaattttctggcatagctgcacagtttatcgctataaatgactgactatgtcttggtgatgcattatgaatagactgagccataagttcttttcctgttccactttctcccgttataagaattgtataatcagattcagctattttcatacctaatttcttagttctttccatcttcgttgaaactgtttttatatcatcaaaagtatatctagcaacttgtcccttttctctaagcttctttgataggttttgctccaattttcttatataagttatttcttgaatacaaaaataatacccagtaacccttccaaaactctctatattatacttatttacgtttaagtacttattattaaattttataacttcatcatgtgccttactcaaactaaaaatctttttaatattctcattctctaattcatctatatttttccctataatattactttgaatatctagtatatcccttaaactattattgcaaataattatgtttcccttatctgataccattgccatacctaagtttgataaatttattatagaatttaattcatctgcttttatagtaagttctttgtatttagtatttattcctgaatataaactaattatttcatctgtatacttaattagcctctcagtaatttctttatcatccagtttgagttttgctattatttgaataaacgttgaactatcaatatacctatggcctaaatcaataacttcttctatatattttggaactaaacttgactctcctggcgttatagctatcttaatatttctatattcttcattgggattgtatggtataaaattcaaatggtttattcctatattgtataaattagatattgtttccaatacagtatgcttattatcgtttactactaatacatctatttcttctggcaatgaaaataacttatatatatccttttgctttatgctcctatttatagttattatctttgagacatcttctacatatttttttatttttaatactctatcatctatcattaccaatattatgtcatcttttattaattccttctctgttattttatttaaataataattttttatcattactttatctttaaatatcatttctagatttttatttaagaaacattctaatttagacaacccatcagttactactgctattgttttcatttgattactccttttaaaatatactctactcttttataatatacatctgattttcactttaatagcacaaaaaattgtacatttagtatactaacatattcctttattagttttatgtccctaaatatcatagttgcaatatctatcatatttcttaaacttctataaagcaaaaattgtgccaaattaataattttcttaattttattctaaagttcctcaatagtatttacagacttagcacttatagcttataagtctttatattattaatctatttttataggttaattgtacaaatcatatatcacttttacctattaaatgcattataaaaaagatggaataacgattcgtcactccaccttttttgtaataaaaaattgtatatataaacactatttactactcttctaagtacaaacagtatctacatactataacctttcaccattagattctattacttgtttataccagtcaaaactctttttcttaatcctagacaagtctccacttccatcatcatacttatccacgtatataaacccatatctcttggtcatctcaccagtagatgcacttactaaatctatacatccccatggagtatatccaaataaatcaacaccatcttctacagcttccttcatttgctctatatgtgcttttaaatactctatacgatagtcatcatttatcactccattagattcttttttatcataagctcctaaaccattttcaactaccatcataggtattctatatctatcataaatttcatttagtgcatatctaagcccttcagggtctatttgccatccccattcactagacttaagatatggatttttcactccacctaatatgttgccacttgtattatcttctttagaatcactacttacacatgtagacatataataactaaatgtataaaaatctacacaaccttcttttaaaatttctaaatctcctttttccatttttatttcaatattattttctccaaaatatctattcatataagttggatattcgccacgcacttgtacatctccacagaaataattcattactctactatctctttgagttttaactgcatcatctggattacaagtataaggatacattgttgcaaatatttgcatacatccaacttgataatttgaatctatttcatgagctaatttaacagccttagcacttgctacaaattgatgatgtaacccttgaaaacgaagttgaggtatatctacttggtttataaaatctgtagtcccttcatttaatattccttgtgataagtagcctcccataggcattgtagctgaatttatttcattaaatgtcagccaatattttacttttcctttatatcttttaaatattgtttcacagtaattcatatacaagtctattacctctcttgaaacccatccattgtatttctctgttattgcaaatggtatttcatagtgagatattgttattaatggttctatattatattttaaacattcatctatcacattttcataaaatttaagtcctgcttcatttggttctttctccattccagttggaaatattctagtccatgctattgaaaatctaaataccttaaatcccatttctgcaaataaagctatatcttctttgtatctgtgataaaaatctattgcttcatgacttggatagaatgttcctttttctataactctcgttattcttttacttactttttgagaacccccagtacacatatctgaacaagaaggacctttcccatctaaattccatgctccttcacattgatttgctgctgttgctccaccccataaaaaatcttttctaagtaccattactctacctccaataatttatttatagtaaatttattttaaaataaaaatacatatatctaatttttaattaataaaactctcttttaagctaaaacagttatcaattcctgactattatttacatgcttttgtgtattttctataatatccacataatcagaataattagtaacaactactggtgtttctaagcaatatccttcttttgatatgctttctatatcaaaagttattaatgtctgaccttttttaatcttatccccttgattaacaaaagatttgaaatgtttaccttccaactgaatagtatttaaccctatatgtatcaatagttcacaaccattatcagatataattcctattgcatgttttgttggaaataaagtcattatagtcccatcaaatggtgccactacttttccttctttaggtgttattgctacaccttttcccaatatacctgttgaaaacgctgcatcttgtatctgctccaaagcctttacttcaccttttattgggctatatactacttctcttttgtttttttctacaacgccttgcccattattatctttagaaatttctactatagaatcatctttccaaaaaaataatgttaaaacaaatcctactacaatagctactattattgctattatagttgcataaacacctttcatatctccagttgttggatttatataattaggtataccaaatattccaagtccacccattacataactttttacattcattatccccattacagctcctgccacagcaccacctacacaactatatatgaatggtgtttttcttggtaaagttattccatatattgcaggctctattacaccacatatccctgaaataactgcaggtatacacagctcttttatcttcttatcttttaatttaaagtacattgctgctactactgatgtttgtgcaaaagatggtacaaatgctcccactaatattgtgtcaaaccccatagtcataaggtttgacatagctattggtactaatccccaatgtagaccaaatattacaagcacttgccacaataaaccagttaatacaccacataaaattggtgaaaagttaaataaagctaaaaatccatttccaactatattagaagcataggtagctataggccctataaccataaatcccaatggtaaagaaactaataaaactgccattggtacaaagaaattctttactacatctggtattattttagcaaacactttctccaacttagctgctaataatactattataattactggtactactgttgaagtgtagttcattgctattactggtaatcctaagaaagttatatatactggtgattcaaatattgttccagtaaatagattgtataaaggttgacctatagatgctagagtatctaattgaatacctgaatagcataaaactgcacctataagcattccaataaatggttttaatttgaatttcttagcagctgtatatccaagaattattggcatatactggaacattgcatctccgattgcatttaacataatatatgcaccatcagtttctccatacaaacccaatgctgtaaatactgcattaaatccttttatcataccagcagcacacagaactcctaatattggttgaaaaactcctgatattatgtctataaacttattaagtaatccttttggcgcatctgaatctgaattatctattgtatctcctcctaatccagccaaatcgcacacaacttcataaacatctggaacatgattaccaataactacttggtattgacctgcacttttcattacagtaactataccatccattttttttagcacatcatcatttgctattgattcatcttttaatttaaaacgtagcctcgttatacagtgagataaactgctaatattatccttccctcctacattctcaatgatttcttttgatagttgttcatatcttctcattttttctcctccattttctttttgaaatatgaaggtttggccaacttaatgtcaccacccaatatatataaacctaattattaggatttatatctgacttaatacttttacttaccactctttcaacgtgaatagttaagtataatttttcctcatctgttaaatcgtagttgtattttttatgtataaattcatccaacttttctatgcatttataagcatttttatatttaacttttattacatttagtaaatcatcttcattattttcatgtaaattattactaacaattcgttctgcaaaatactttaagtgagtaataaatctatgataataaactgaatcttcatcaaatactattctgtaatggtatttaaccatatttgaaatttcttgtattatttgtgtaatctcatatatagtttttatactttgatccatttgtgcattaactatatgcagtgctataaatccagcttcatcttctgatagtctaatttcaaattttttttctatataatccaatgcttctaaccctattttaaattcactcttataaaatctttttatatcccaaagtaatacattttttacacttactccttcacgagctctttctattgcagtatacatatggtctgttaaagaaatataaatactatcatttaatcttttccctagtttttctttagcatataaaattatttcatctgataattccatatatcttataggaatatctgctattagttctttaaatttatcagatatatttgggtctgaaagtttgaatatcttatcaattttatcctttgatatatgctctcctgtacgttttttataagctaaacctctccccataactactatttccttatgattttcatcagttgtaataattacattattattgagtattttttcaataatcattgtgatgccccctttattagcattaagttaaaataaatcttttttaattatttagaatatttaaaatgtaatttattacataaaaaaaaacctatttattacacattaaatagactcccatgagtcctgagtaataaataggtttagcttgtatttaaacaatcactatccgtttgtattttattttaattattatttattatatgttagcaaatttattttttagtgtcaactttttctcaatattttaattctaaataaattatataaattgcatctgcaaagtactatttttataaataaacaaaataaaaaaggtattacttgctttaagtaatacccatttatttttaatttaagtggtttttcttaatctcatcaagtagtccatcttctaaataaatttctaatgcacatcctaccattgcctttactgctttgtgaagtttatcataagcttcctcagaatttgcataatttagaaattctttttcatgaacatataccattggacttatatctaaggctatttctgtatacatagtagggcaaacttgacttacattacctatatctgtagaacctactggaccatctttaccttctaatatatctgttatacctgactcaatcaaattattctttgttatcttttgaagtactttgttatttattatgttgtcaaaagaattttcaaagtatctataagaaagcttagctcctgtcattaactctgcaccttttgcacagtttataacttttttagtcacttcatctaaataacttctttcagcagctcttacaaaaaacttacaagctgctttttctggaactatatttggagcctctcctccatttgaaactattccatgtattctaacatctgattttacatgttgtcttagtgcatttatcccagcaaaagtaagttgtactgcatctagtgcattaactcccatatgagggtgactagctgcatgtgctgataccccttcaaaactaaactctaatgaatctattgccaaagccttacagtttatattattaaaagcttctatatgcatttgataacttacatcaacatcatcaaaagctcctgccttaactaaatcacattttcctcctgttgtttcttcagctggtgttcctattagtacaatttttcctttaaaattttcttttaacttacttaatactatacaagctcctagtgtagatgctgcaatccagttatgcccacaagcatgagctggttctttattgtctccatatccaggaagtgcatcatactcagctaaaaatgctatggtaggtccatcattatctcctaattcagctctaaaagcagtctccatattacaatatggataaactgtatcaaatccatattccttcattttctctactaagtattttgatgatatgtattcttcttcccctaattctggattgttaaatataaaattacaaacttcttcaatttcttttccaagttcattctctatctcataagctctcttctttatactctctatcataacttacctcccactagaatcctagatataatcctattgtcaaaaataccattacaagaattgttaatactaccattaaaggaattacgaatctaacccactttgaccaaggaatattggctactgctagtgctcccattaaaacacctgatgtaggtgttattaagttagttacacctataccaaattgataagctgtaactatcatttgtcttgatacatctactaagtcgccaagtggtgcaagtacaggtattgtaagtgatgcaagccctgatgctgatggtattaaaaatgctattaatccttctattaagaaagttaaatttataaatatagtttttggtaatccatttaataaatttgctgcagaatttaaaattgtatctattataaatccattttctgctattattacgattccacgtgcaaatgctatacataaccctgctgtaattaaatctcctgctccacttataaatgaattaactatctcatcttgtttaagccctgatgctattcctgatattatacctatagctgtaaatatcattgcaatttcagttatgtaccactctagtcttaaaactccatatatcataatcgccatacctattgtgaaaatggctattaccatggcttctctttttgtaaattcctttatatttgtatcactattaaccattgattcttgatttagtgatatatcgtgtactaaagattttttagggtcttttttaactttattggcatacatcataacaaatcctatagatatagccatatatattataaacataacaactctaaactctattccagaacctggtactatttgtgataatgcttgtgctattcctacagagaaaggattcgtagtagctgctccaaatccagctgttgctcctataaatactgtggccactgctgtcaatgaatcatatcccatactggtcataagtggaataaatatcatataaaaaggtagtgtctcttcactcattccaaacgtcgtcccacctagtccaaatagaatcattgaaatcggtattattaaaaattgaaacttcttcattttatttacagtatgagctataacagcttctatagcccctgttttattaactatcccaaaagctcctccaactattaaaacaaatccaactacttcagctgcatctataaatccgtttataggtgctgtaaatacatcagtaattccttgtggatttgatggtgctttttcataagttccagctacaacaactgaccttccgtctatatctactctttcaaaatttccacttggcactatccaagtaagaattgccattaacactattagcgaaaatattattgtaagtgtctgtggcatagtaaactttttcttttttaaactgctcatttttaatctccccactttttaaattaaatattttattattgcatccctttatcctattttgtatagatgtaaaaaagctcaacatggatacatgttgagctaaatgtgctaaatacaacatacctgcatcttccctttatcttgtttaagatagctctccatcaaaattcgggataattttgatgacagtactgtacctattaaatacagtcccagcactagctttggacactagcacttcggcacttactccttttatattgcctcattggtttccaacctcttcaatattaatcttagtaaatgcaacctctacctcaatctgttcgttagatgaggtaattcttattaatttttattgattcaaagtaattgtagcataatatgtcgagattgtaaatattttcagtataataattcttactttatgatgtcattccatttttcacaaataattttttctccatataatttaaatactgtagtatattttaaatacacacaaactttccacaaatttttaattattataatacctttataataaaaaataaaagccatgtaaacttatcaatttacacagctttatatacattaatctactccaagtacagctttaagctttgatgctattgtaataactcgtggaccaaatataacttgaactgagtttttctttttaacaactccacttgcacccaattcatttacccagaaaccatcttcatagaatccatcaattgaatttagctctaccctaagtctagttgcacagtttgtaacattttttatattattacttcctcctaaaccttctattatagaatgtacaagctttgtatctttatcatctacttcctcttctactgcattgttgtatgctgttttaccagcatctacagattgtctttctctatattctttcttactataaagcttaacttcttctgaacttcttcctggtgtttttatatcaaacttcttaattgcccatgtaaatattatataagtaactataaaaaatattggtatcaaaaataataatggtaacgcatccactttttgtggttgtaataaattaggaaacatatttctaaatgattctcccattatagaaacattaaacatttctgtaaatacatacgtcaatcctgccagtggtacatatgctacaaaatacaataatggtgcaacaaataggaatgtatactctattggttccgttacccctaccaacatggctgttactattgctggtatcaatatacttattgcttttttcttattagcattatcagccaacttatacatagctaaagctgctgctggtaatattgcaaaatgtattaataaacgacctgttgtgaagttacgagttatataagatagtgtatctgggtctcccatttgagctaatcttatattattaacaccctcgtaaattgctccacctacttccattgttccacctactcttgtatattctatagggaatgcaattaagtgatgtataccaaatggtaataatgctttatccattgctccaaaagtaaatgttcctaataatccactagaacctatccaattaccaagtttagataatgccaaccctactggtggccatataaagtacattgctgtacccaatactattgatgctataaacatcataatcattgaaaatcttggacctgagaaaaaagataatgcactaggaagttctatgtcaacaaatttgttatgtactgcactagctacaaatccagctattatagctccaaatatactacaatcatatgaaaagattcctaagaaagaaccatataaagaacttcgactatatgcttctgcctctcctaatccagatgccataaacgcttctgctgtaactgtatctgaatttataccatttgatgctaacaatgtacttataactgtgtgcattcctataaataaaacaattcctcctaatgcaccccatcctttttcctttttagataatccaaaagctatacctgtaacaaagaatattggtaagtatctcattaccataaatcctaaatcgtttattactttaaagaatacatttataaatgacccttcttttattagtccgctaagccctaatgcagaaacgttttccatatttgcaaaagctgaccctaatcctataaatactcctgctacaacaagtaatataacaggtatcatcattgctccagaaagtacttgtaatttatccttcatagtattatttcctccatttttattgaaatgccaggctatataatgcatatatatatacttctattgctttgtataatgtatctatacttatattttcatttgcctgatgtgaatttggattatctccctctattgtgggtccaaatgcaactccattttttaacactcttgcataagatgcagctccttttgtaaaaagttcggcttcttttccaaaaccttgtttatatgcacttgataatttatttattaattcactatctggttttacatacagtaattttaaatccttatatatatcaactattaaattttcttttttcccaatttcattaattctattagttataaactcccaacttatacccttaggatatctaaagtctattttcatattcaattcatttttctctaagaagatactcattatacatattgtagaaactcccatatctacatcttctttatatatccctaatttttttccatgattatcatctgtaaagtatgaatttaaaatatcccttattataacgcctttatcatttagctttttaattttctctaaatcttttgctaaactaaatgcacagttatatgacctgtgtggatttctcgataaagccctttctcctgtatatcttactaatactttaccttcttctagttcttctatctctgtataataagctaatgattctactaaatctttcttatcatcagttttaaaaacagcctcaattttgtcacatacaaatccatcttctttgtttgactttatatcaactaaattgtgatttctaaatttatctttatctattttctttcttagattgaagtataaaataccattttctccatttactattgggaagtttccatctggagaaaatgcaaattttggctgttcattgacactaaagtaatgctccatacattcccaagtcgtctcttcagctccacccactatcaatctaatctttctcttcggcttttcattaagttctcttaagaaaagtaatgcatataaaatccctatcaaaggtcctttgttatcattaactcctctaccataaagatagttatctttttgacatactttaaaaggtttactcttccaaagttctttattatatattggcaccacatctatatgattaagcacccctactacttcttctccttctccatattctatatgaattgcatatccatcaaagtcttttacaacaaaatctttgtcttttgctatttgaataagcttatcgaaggcatttcttatttctatcccaaatggttgatttatatctgttgtactttcatctctaattgaaggtatttcaactaaacttctaatatcctttatgatattttcttgattggattttaaataatcaataattagttctttgtttactatcatcttaattatttatcacccctttatattaattttacaaagcatttcagttcatatctacattataaattttgaatattattttttcaatatttcaaatacttctctaaattaccataatgatacggtaaacaatcaacagattatgacaaaatcatactatacctattactaatattttaacttatctattacgtcttttttaatgtaattttattccaaaaatagatataaaaagatgtagccttagctacatctttttatatctattcaacttccattattatgctattaatatctacatttccaggttctatcctatcttttactgttctcttaacagaatcagcatcatccattataactacaggagttattatatttaaatcatttgacgttataaaatctaaatctacttccattattaaatctttagcttttaccttatctcctgcctttaccttaacatcaaacggctttccttctagtgacattgtctctaaacctacatgtattaatatatttgtattatcattactcttaatcattattgcatgctttgtatcaaatacattgactatttcaccatcaacaggagaatataacttaccttcatttggtattattgctactccatctcccatcatcttttgggcaaaaactgcatctggaacatcttctaagttcactaaatttcccttaaaagggctatatattttctcaatcttattttcttttttcttaaatatattaaacataacacactctccatattataaaattttatgataatatttttcttaaagcttttgctacaccatcatttacattagtatcagttacaaaatctgccatagattttacttcatctgtagcatttcccatagcaataccaagacctgcaaatttaatcatggatatatcattttcattatcacctatacaaataacttctttgctatctatacctaatatatcacaaaattttttaactgcaataccttttgaagtacctttactcataacttcaaaatttatctttccagaacttactacttctaaatcttcttgttttttaaattcttcctttgcttctctcaaagaatctacgttttctgagaaaagtatacattttaaaatttcattatcagctttttctaataaagtttcacaacttgcattttctattatttcaattctgtcttcttctttatttttactatttattaatctatatggatgttcttcacctatttcattgttggatataactattttacagcctttaaaatgtttgtttaaattatacttttcacctattgtatagattttctttatagcttctttgctcaaaaccttcttatactcatatcccattaatttaaaatatgtcccattagttgatataatatatatatcatcccctaaaacacttgtaaaatatttcatagcattataaggtcttcccgtaactaaggctaccttgatacccttttccatagcttcttttagtgctttaatattttcttctgatacttcaaatcctttccccatcaaagtaccatccatatcagtacaaattaatttatatcgcatttgtatcacatcctagtaagatttttctaatatttcaacaaggtcttctttctttccaaaaggtaaaaatcctaaaactggacagcttgttatttgttctaattgttcctttgttacattaaactcagacatttttgtcttaagtcccactctctttaaaaaactttctatttcatttcctaaagttttagctgcttcatcatcttccactttttctaattcttggtttagcattctcgctactttggcaaatttctctatattatccttatagaacttttctgcaaattttgggaacactatagccaaagcctcaccatgaggaatatgtgtaactcctcctattatttcacttagtggatgtggtgctgctgctccagcatttgccagtgaacttcctcctaatgtatctgctactgctaactttgttctgtattctatattatttttatcttccattactttaggtagatagttaatgactaattccatagatttttcagacattatctctgtaaagtcattagcatttggatttatataactttcaaatgcatgagtaaaagcatcaaatgctgttgatgcagtaattctctctggcagagttaacataagctctgggtcaactatacattcttttgagaaacaattttgatgaaatattgtatttttctcgcttcctctcgatattactgctgcttgtgtaacttggcttcctgttccagaagtagttgatacagctattaatggtaattctttttcacttaccttatcgtatattttaaatggatttgtatatgtactaaacatataatcccaatctattttttctaaaccaaaagtcaatgctaatacttttgcagtatctatacttgaacctcctccaacagctaaaacaacatctacagattcttttttagctaattcgaacccttcatttattaattctacagttgggtttggctctactctatcaaagtgtacaacttctatacctttttctattaaattcaatgtaactcttttatataacttgtctaatggctctacatttggagtagtaactaacaaacatttctttccatattttcctattattctaggtagttcacttaaagttccttgtccaaaatttattcttgatggttgataaaagttaatcatatttttcctcccttaaattattgacttcatattcaaattatacatatcataggatttttaaggcaataccttcactgttaactcttatttactaaagcttatggcaattattagacaataaatgttttattattaccatatcattatgtaaattttattaagtacccatgttataattttataatcaatcttattgtataattgacttaataataaaaatagagtatatacacttttttatgacaaatagcttaaaggagaattaaattatgaaatatttgatagacagtgctaatcttgatgaaattcaaaagtgtttaaagtatggatttaagggaataacagctaatccatctatgtatcttaaagagaaggtaaacttccatgaatttattgagacatgtactaatttaaatccagaaatattaactgctgaagtcattggaaataatttatacgaattaattaattcatgtgataagatattaaatataaataaaaacactataataaaaataaatttctctgaagttggcttagaacttataaacatattaaatagtaaaggtgtaaaaactgcatgtaccttgattttcaatgtaaatcaagcatcattagctataaatgcaggtgctgattacctattcccttttataggtagaaatgatgaaaatgggaatgatggtataaaaaaccttacagaaatatgtaaccttatatcaataaatggatataatactaaagttgttgcagcttctattaaaaatgtattccacttaactcaagcatctctttgtggatgtgattatgcagctgtaacatatgatttatttaaaaaagcttcttttaaccagcttacagtagatggtgccaatacttttgaaagagattggtccaaggttaataaatagtaactaagatttaggagggtttgcattgaacaaaagattattagatattgctgaattattactcaacagctcagactatattactgtagatactattgccgaagaattaaaagttagtaataaaactattcgtaatgaccttgttattttagatgaatggcttttagagtttaatttatccctagataaaaaaactggttcaggggttattattctaggtaatgaagatataaaacttaaagttattagagatatcaatgataaatcaaattgtatatatgcatactctcctgaagatagaaaaaggtatattctaagtaaattatttattaaaaattctaagtttaggattcgtgatatttgcaatgaactacatgttagtagagctactgttcataaagacttggtagttattcaaaattttttgcaaaactttaaagtgactctagttagaaaaaccaataatggagtatatttagagggaaaagagaaagatattcgaaaagcagtttttgaacttgctactgttaataaaagttatactgaacttaaagaaatattattctcgaactctaatgaatgcaaagataccccatcaacaaaaatatttaaggagctatttaactatgattttgagaaattatctcaaatcactctacacaccttacaagtagaaaaaagtaaccttagtgatgagtattatataaacttcttaatacatatagctatatgtattaagagaatttcaattaaaagatatattaacttatctgaaggtttttttagagaattattagaacatgaatactttgaaaaatcaaaaattttatgtgctaacctaagtgaagcttttgacgtagaatttattgatgaagaggtctgttatatacttcttcatatagaaggattacttaaatcaataaagaaaactactactcttgaacctcttaaaaatgaagaaattacagagtataatctatctgaagcaatagctgttcattggggaagtatactaaatttaaacttaaaggatgatttaatattaataaagtctcttgctaatcaccttaaatcagttctacacagaataaactatggatttactattacaaatcccatattaaatgatataaagagaacatttccttatacttataaggctgctaaagagtctaatactgttatcaaacagttgatgaattatgaagtcaatgatgacgaaataggatatcttgctttatatttaatatcagcaatagatagaagcaaatctcccctaaatactattttaatatgtcactgtagtgatggtgtatctaatttattagtccaaaagttaagttttgaatttaatcagattaatatagttaaatctatacctctatcttctatttcatttacgaactttgatgatgtggacttaatactaaccactgctcctgtagactttgaacataatgctgaactgataaatataaatgctcttttaagtaagaatgatatttccagacttagtacaattataaaaaaactatattctgaaaaaaataaaatattatcttataaataaacaaaaataggcttgtctcaacatagagataaacctatttttcattgtccaaatgataaaaatatatttgatttcatagaaaaagtgcctcatgaactaaaaaattcattttgagacaccttcattttttatatttaatctttttatttaagcttttatattttttaaacttttatattttttaaacttttatatttaaagtaaattttattatttttattgagcgcaagcattatttatattattaatttcttcagtattcttaccaaactttgtagttacaaatcctattgtttttattatgagtaataaggatatcaatgaatatatagatatcataaaattcttacttattattccagatgctactattataaatccatctagcataaataatataactggcaacttcagaaacttaattaccttattaataagcattgcaactaaatcagttccaccagtactacagccccttattattgctatccctatagcagttcctaccaataacccacctatcactcctgctactaatagattgtcagttatgtgagtttgtggtattacttttaagaataatggacccataagagttatatataatgtttttattccaaaacctttccctaaaaataataatcccattactaaaagtggcatagatattcctaatgatatattctcaacaggcattgataagaatgtgctaagtacgactgataatcctgttatccctcctggagctaatgtatgttctgcaaagaaaaaattaactgctaatgccattaaaaatgctgatattgttatcagtaaataatcttttatcatttcttttttcatttaataacctcctatgattatattgtttcagtataaaaaatcaattaaattagtctagcttcctgtagtttttcataaaattaatgcttccttaaaacattaagaaagcatctcttttatcatagtttattatcttattctaaaccaaactttgtagctgcttcatctatagcttttctacaattcttaacacctgctgttataccatctttatccttgaatattgctgaagataatattacaacgtctggattacattctattaatggctccatattgtctgctcttagtccaccatctattgctaattcacacttaggattcttttcgtctatcatttttctagctctttttactaaatcaacagcactctttctccatccccagttatcttttccatcagtttcatcaacaccatgaacgactatttgcaatctatctatatcatatatagcttcatcaacaaaacatagtggtgtgtaacatccaattgttaatcctactttcataccaaattctctacagtaatttattatgtatgcaagaggagcgcctaaaaaatgttctgctggtattatcaacaagttacatcctgctgctgctattttttctataaataatctatcacaatctcttgtgtatatatggcattctattggtttatctgtcactggtcttattgcttctattatttgatgaccacccataagttgcatattttttaagtcatgcatatctgctgcatctgaatgtacgtagtctacacctgcatccattgcttctttaactacggctgatatatgaccgtaatttacatgtgctaatcctgctgctatttttatgtgtttcatatttgtatacctccatattttactttaattagtattaaatattagtttttgatattttttaatccagtattacttttatttagcattacttttattgctgtatatatttcttttatgaacttattctgcttttgttaactgtgaacttattttgctttgtaaattaatattacactgatatattttttttcacaacactttgactactccttaaaagtacctttatattgtggtaaattatagacattaattgtatataaaaagttagttttttaccacattcttatggcatttattgtctatactaactcaattgatatagctagttcatttaatatataatcagactataaatataaatttactcgataaaaagtaccattcataacaatattaatgaaagggagatgtaaaatgagaaactgtattattgcccaatctggaggccctacagctgttatcaatgcttctgcagttggtatttatgaaaaaaatttagaaactaaatactttgataaagtatattttggtatcaatgggattgaaggtatattaaacaaaaatataatagattcagactccttaaacaaagataatgtattaaatttaaagcaaacaccttcgtctggtcttggttcttgtagatacaaactggctgattataaaataaattcttatgattatgatagagttataaatatactagatgaatatgaaatagatacattattttatataggcggaaatgattctatggacacagtgatgaaattttctcaatactgcaaaaacactacttgtaaaataaaatttatagggattcctaaaacaatagataatgatttattaggaactgacaactgtcctggatttggttctgctgcaaagcttatttctacactaataatggaaacatacttagatttttctatatacaaaaataatggtatatttatagtagaaaccatgggtagagatactggatggttagcagcttcttcttcactagctagacttaatgatactccacttgttgatttaatataccttccagaaattgatttctatgaagataagtttatagaagatgttagaaaaatatttaaagaaaaaaataaggcttatatagttgcatcagaaggtataagggataaatacgggaactttatatgcgaacaaaaaacttctgctcatgataaatttggtcattcccaattaggtggagtaagcaactatctaaagaatcttatagtatcatcatcaattacaacaagagtaaaaaccttagaacttggtgtaatacaaagatgtgctatgcatttagcttcagatactgatttaaaacaagcagctgaagttggtgcatatgggatagaactatctaaaaaaggatatacaggagttatggctatcattaatagaacatgcaataatccttataagtatgaagttagtcatactgatatttctaaaatagctaacaagacaaaatattttcctaaagagtggataaatgaagaatgtaattatataactgatgaagccctaaattatctatatccacttattcaaggtaaaccagatatcaaatataaaaatggactaccttatttttcaattatttactaggaaattattataatttgatatacactcaattctatcgctcttaaatacctaagtggctgttaaataaaattataaattgttatatgacagtcacttaatcgtttaattatttaactgtttagttttttaattttttaatcttttttaatactaatacgatttgttgtaataatatctcacacccattttcattttggatagattataattagttagacaataaatattttgtcatgatattattatatatagtgatacaaatagaaatacttttatcatgactagaaaaacaaagattacacaaaggatttaaaaatcaaacaacttcaattaaaataaatggttaaaataacttctaaatcaactacataaacaataaaagaacataaagtagttaaatctacaattataaaattggtaagactataataacttaaataaaattaaagttaacaaagactattaaagttagcaaatattcctctacctaaataattgctttttataaagagttatttattttaatttattttaattgaaatacgattttaactagaacaatagattaatgtaatatttaatataaaataattataataattgaaaaggaagtaatctatgatgaaaatagcagtcataacaaccgaatttttaaaagagtttgtagataattctataaaaaagttaaatattaatgcagaaattgaaatatatatctatagagatttttctcatgttggagatttatatttagaaatagaagataggtttgatggatttgcagttagtggccccatccccaaaaaagctattacaaaaaaggctggaactattaaaaaacctctagttgattaaaaaatagctacgcacacttgtgactttagtcatgagttagtagctaaaatagtcagcatatagggaaacctatatgtagagataggatagaacctatccaatactacttgaattgctggaaacccctaaagctaaccaaactaaaacataaggatgaaataaacctaagtgtgaaagttacgaaagtagaaaaaattggttagatggtataaggttaaatcctaagtactttaaaatgggcaatcagcaggtaagctccgaataggagaaacttcaacgactattcctcttgagggaagtacactacaagctattggtagtggaagtgggtagaccttaacggataatgccgaaggataagatatagtctgtgcttacatgaaagtgtaagaagttcataagagaactgcataggtagtagcgaacttatgtgaacgacaacctcaaaaatgataaaagttaagaatttacggttcttatatatgttatttaaaaataaatataaaaaaccttcaaaatacttgttttaagtaattgcatattttaatattatgataggtgatgaaaaatggaagttactcatggtagaggatatgcatataatatgtcaaatatagatctccagtattatggggagacatttttggaatcctagttatttcgttgctactgtatcagaaaatacagaggagcagataagaaaatatattaataatcagaaaaaacaagtaaagtgaggtgatagtagtggaaaaagcttataagtttagaatgtatccaaataaaaaacagcaagagttaattaacaaaacttttggatgttgtagatttgtatataataagtatcttgctaaaagaatagaagtttataaaaacgataaagaaacttttacttataaacagtgtagttctgatttaaccaatttaaaaaaagaattaaagtggcttaaggaacctgacaaattttcactacaaaacgccttaagagatttagataatgcatataaaaaattctttaaagaaaaagtaggatttcctaaatttaaatcaaagaaaattaatagattttcatataaaactaactttacaaatggaaacattatgtattgtggtcaacatataaaactacctaaacttggtatggttaaggtaagggataaacaagtacctaaaggtagaatacttaatgctactatatctaaagaaccaagtggtagatattatgtatcattatgctgtactgatgtagatattggagtatttgaaaatactaataatcagataggtttagatttaggaattaaagaattttgtatctcaagttgtggagaatttatagaaaatcctaagtatcttaagaagtcattaaacaaacttgctaaattacaaagagaattatcgagaaaaacaatcggtagtttaaatagaaataaagcaagattaaaagttgcgagacttcaagaacatatagctaatcaaagaaatgattttctacaaaaattatctactaaattaataaaagagaatgatattatttgcatagaagatttacaagtaaagaatatgattaaaaatcgtagactatctcgcttaatttctgatgtatcatggtcagagtttattcgtcaattagaatacaaggctaattggcatggtagaaaaattgtaaaagtaggtaaattctttgcaagttcacaaatatgcaataaatgtgggtataaaaacgaggaagtgaaggacttaaatataagagaatggatttgtcctagttgtaatgaaactcacgatagagatataaatgcaagtataaatatattaaaagaaggattaagactaataacaattcaaaataaataacttatgtaagaaccgtaggaactacggggatggcctgtgaagaattagtaagacatattttagtatgcaaaattctatgaagcaggaaccctgtgactttagtcatgggaggttcagtttggtactgacttacaaagttactatgatatgtttctaaagcttatctttaaatataatacattagatttttctagagcatactttgacttaacagactgggcagataatccaaaagatatatcatattatttatcaaatggcacatttggagacttaatggatagtattgatgaaaatgcatctaaaatgagtttatctgacatagcaaaacttgaaaaaaagattgcaaaaaaacatattaatctatggaatgaagggaaaatcgatttttctactactcgttttagtagtattgttcctatgttacaaaatgcaggagtaaactttcatttcatataccctgatatagatttattaaaaaatacttttaataacttaataaaagatattcatttacatagaatgaagggaaatcaaccaagtgtaatatatataacagttaaagatacaaattatgatgactctactctagaccaagtttataaaatattaaatagtattaaaaaagataaattaaccgattttataattgaaaaaaatagtaattcttttaaaattttcactaaatgtgaaacgattaaatcattaactaaaaattttactgcatgttatataaaagaatctattgaaaatagtacaaatattaaagtatgtgttggatatggaattggtaatgatataaagcaagctatgtctagtgccataagtgctaataaggaatctaaaataaatcctttaaattacagtttcttagtcaacgaaaattatgagacaataggacctttactgtgtgataagttacttactgtttcaaataaagtaactccacatataaatacaattgccaaaagttctaaattgtctactcttactattcaaaagattatatctgttactgaaattctacaaagagatgaagttactcctaaggaattatcttcatgtttaaatgtaacagttagaactgctaatagatttctaagtagtctcttaaagtctggaaacgctactatattatatgaaaaacaaaactcaacaaaaggtagacctgaaagggtatacaaattatttatatcagaaaataaatattaaaatccaaaatgcataaaaatattttatcatctaatattaagtaaaattatatatgactttctaaaaggtatatctttgcatctttttaagatataccttttatgatatttaataatattttatgttattatctactaaaattattttctaaccattttactgcacaatgagcaaataaagctgaaccataaactaatccctcttcattaaaaattgctttaggattatgcataccaaaattatatccctgactaatacttcccattccaatccataaaaatactcctggaacccttagtaaaatctctgaaaaatcttctgaacccattgcagatggaaagtctattacattctcatttcctataatttctttaacataagatacaatctcatctcctacatccaaatcatttataactgcgggagtccccattttaaattccactttagcatttcctccaaatgatttagctattcctgtagatatttcaataattctattttttaatttttctctaacaaattggtcaaatgttcttaaagttcctgacatagatgctttatttggtatagcatttggtacgtttcctgcattaaacataccaatagttaaaactacaggctctttctgaggtttttctcttgaaagtatagtgtttaatgctatttgtatatgcgacattatgtttattgggtccactccaaattcagggcttgctccatgagttgcttttccttctactgttatttcaaatatatccgcagatgccatagctggaccacgtgaataagctacttgacctgtgttaagaaatttacccaccatactgtgaaatgccatagctgcatcgacctgaggattttctaatataccatcatcaatcattgattttgcacctctggtactctcttcatctggttcaaatacaaactttactctacctttaagtaagtgcttattatccataagtattttagctgctcctaagagcattgctgtgtgattatcgtgtccacaactatgagatgcatctttattcttacttttaaaaggtaaatccgtctcctccataataggaagtgcatccatatctgcccttaataataaggtctttccaccattttcactgtctaaaacagctactattccattattagacgtcaatttcggagaatatcccattttttctaaagtactggtaacaaaggttactgttttcggtagattgcaaccaatttcgggattttcatgtaaatatcttctccatctaataatttccccttctattgactgcgcttctttaaaaaaatttttcatattccttcctcctaatcagatagtcagcaaaatctcactttcttttagtaatgaaatgatgctgatataaaaattataattttatatattaaacttcatgtctttttaaggagttggaatatcatctggaataggacatttatatgttttaccattcatagatttatcaaactcttcttttgcctttttagctatctctggattatttaatattttggctccaaacatagccatgatttttgatgcatatatcatacctttttctcctatagaacttcctgcacaagatgtaaactgccagctatgacctggtgcacctagattcgtacaccctgtaaaaaagtatgctgtcggaactatatgcattacatctccaatatcagtagaaccataactattaaagtttgtaacatttcctccaccataatatagatgagttccttctggcaaattatatttacttatcatagccttatattgttgtgggctttgtctatctaattcagctgcaaaatccaattcctctcgagtccaaggctcttgtttaatctcattcatacattctgatacaagatttgctaaaacatgattatttaaagtattataacaacctcctaaaaactctacttcaacttcagtttcagtcatcattgcagctccttttgctacctttacaagtctttcatatgtactttctacagcttctctacttaaagctcttgtataataccatactgatgctttatcaggaactatgttgggtgctactcctccatctgtaattgtataatgaatccttacatcagaagtaacatgttctctcaaataattagctcccacattagtaagttccacagcatctagtgcacttcttccattttgagggtctgagcctgcatgtgcagtctttcccttaaagtgaaattttacagagttaacagctgttgaagtaccaattgtagcttcactaattttatttggatgaaaatttatagctaagtctaacccttcaaatgctccacctctagccataaatcctttacctgttaattgttcttctcctggacatgcataaaatactatagtcccacttaagttattttctagcatctctcttttaagtcctactactgcccctacatgtgctgtacataataaattatgcccacatccatgaccatatgcactcaattcaaatgcttcttgctttgttgaaactttttgatttaaaccaggtaatgcatcaaattctcccataaaacctataactggtttacctgaaccaaaactagctctaatagccgtggctaaacctcctacacctacttccacatcaaatccttcacttcttagaaagtttgctgtattttcacatgctttaaattctttaaatgctttttctgggttttcccatattttcttacttaaatcatcaagtttgaatctttttttatctatctcatttatagatatacttcctatcatttcttattcctcctataagtatatttactatcaaccaaatataattggacctattatactagcaaatgccactgatgcaatggttacagtaacaaatcctcctataatcatctttggtaataaataatctgttgccctttgtttttcttcttcagttccttccatagcatcaataccttcgttggaaattatctgtgttgcaggataagctagcatacaagttacaccaattgcagctgacattcttggagaatatcccaatagttttcctacaattgcagtaaataatattataaatacagaacctacaacaagtattcctatagttggaacaatcatcccaaacaatgctgttggagttaccttagcaagtcctccaggtaacatcaacatacaaccaaacattataattccattagattgagatttatctaaaattcctttttctaaaaaacctattcgtgtaaaaatcaaccctactaacaaacatgctatattaggatttaaataatagtttgcaggggtaaatcctggtattaaagtagccaatcctacaaaattaccaatcatagcaacaaatgaaagctttgcaagatacactagagtagatgattttttacctaaatcttctttaaaaattctcatacttggaagtctaaaattactttttgactcatctttcaaaaaatccccgttatctcttttaaattttaattctttatttatacaatatgtagttatcggaatgccaaagaacttttgaaatgataatactagaattacaaatgcagcaagttcaggtctatttgcagcttctgcaacagttgttacgataataccggcaacagtagaacctgctattggaggtgctgctattaaagcatactctctaccaaataacatactacccactgttaaacagccaacccctattcctacaatacctactaatgcaattacaaccgttttccattcatgacataagtcttcaagatttataagtgttcctaagttagttattaataaagctataccaaagttgctcattgcagctaatatccctgatgctcctgtaatgtcttttggtaaaacatttgtccaaaatcctagtaaaaatataatacatacaaataacaatgttgaaattgcaccttttgttttcttagataaaaactcactaaaagcataaatcattacacatacagtaaagcaagtaagtggattccaaaaattttccattgttgtttcctcctaaatataataattttttatcaataaaacaataattataaaatgtatattatgcagttattcttaactacatatggtatagcttgatattttttgatgatattatatacgtcttaaattattcctaaaatatctaaataaatataactagagttaactctctaaatattaactataattatcaacttactagatttctttttgatttttactttctacataattttacaagttagaattgtacttcaactactttctatcttagtatacatgttggaagacttatatttatttaaatattagatatagaatacatttttacaaacgtcttaaattattcttaaaatatctaaaacgaaataataatataaccattaaaccaatattatcagaatatactccactttaagtcttctttatataaaaattttatctactagtgcatcccctcctttgtaaattagactatttctaagcgaatttagatatcttattcctatgaactattactagaaacaaaaattatttattatattaaatcaatgataagcatactttaaaattctttctatacaagtatgatttatcatataatgacatctataccttcatctttatagtagtcctaaattattcttaaattgacaataaaaataatttcactatttgtaaaaatacttgtttttatattgtcaaactattctcaatatagattataatttcaaatcttttttttgtcaatatattctgacatttttctagaaaatttataaagttatatagtgagtaaatcatactatttttatataatgagtaaattatactatgaatatgtctaaatatttacttaagtataaacataaaaaatgtgtattctcctttttatagtaattttagttgccattacttttaataagaatacacactttactttaaagaccctatactctattttaaatgctttactagacactaattaacattagttcctaacttctatttatcttattactaccctactactatatccgtagaaaaatctaaaacttctccattagattttattacttctttgtaccaatcaaatgattttttcttatatctcttaaaacttcctttgccttcatcatctaagtcaacatatataaatccatatctcttactcatctgacctgtagttgcactgactaaatcaattggtccccacatcaaatatccaaaacattcaacattatcctcttcaattgcagacttcatttgagatagatgcttacttaaatattcaattctataatcatcatttatagttccatcttcttcgattttatcatatgcccctaaaccattttctgtaattaagataggtaattgatactttctgtaaatatagttcaaggtaaatcttaaacctatagggtctattgcccatccccacttactttgttccaaatatggattttgaatcccaccaaataaagatttatcacctgataaattttcttttggagtagatacacttgaaaaataataattaagacctataaaatctaacttaccttctttaaatgcttttttgtcttcatcagtcacttcaatagttatattatttttttcatattcttttaatttatattggggaaacttcccattgcacattgcatcaatttgataataatcacgatcattatctaaaaatgcatttaacacattactaggattacaattgtatggataaattggatttagtccaaatacacatccaactttattgttgggattgatttctctagccaactttgcaacctttacacccgccaaagtcatattataccctacatttgccaatgtttgaaccttattttctatttcactatacttaatacctgctatcatataagtaaaaatatccgagtgctctgtttgagggtcaatatggttcatctcattaaatgtaatccagtactttactttatcatcaaaccttcttattacagtctcactgtactttaaatacaaatccataagttttctgttattccatgaaccatatttatgtactaaattcataggtaattcaaaatgatatagtgttacaataggttctatattattttctattaatgtatctatcagaccttcatagtatttaatccctaattcattaggattttcatcatctccatttggaaaaattcttgaccaatctatagatattcttaatgcactaaatcccatttctttaaataaagctatatcttctttatatctattataaaaatctattccattatgagatggataatccaatttttcttctattttatcagtaattactcttggcgtttcataagagcccttagttacaaaatccataattgcaggtcctttgttatcactatcccatgaaccttcacattgatgggctgcaatacttcctccccagaaaaatgtatctttaatattcatgaattttccctcctaaaatttatactattacagttaataattcttctgattcatcatttgatgagattacatctaaataatcgctagtatttgtaactacagttattatagtagaatcaaagccttcctctataattttatcagattcaaatactgctaaagcatctccttttttaaccctttgattttgtgttacaagactttcaaagaattttccatctaagtttacagtatctataccaatatgaattaatatttctaatccttcatcagtcactataccatatgcatgtttagttggaaatactatagttatagttccatctacaggagatataacagttgattttgattcactaggtataactccaacccctttacctaatgctccagaggaaaatgctttgtcattaacttccccaagtgcaattacctgaccttttgcaacatttccaatactaatagttcttgaattgttctcgttgattattagttctaattctttttcattatcacccttaacttcttctttttcatctgaaggtattcctagtaaataggaagctgctgttgctgctacaaatgatactactacacttattatcataaatgtaaagttagatgcctctcctccaacaagatatgttggtaatgcagctaatccccaaaccattccatatgttttaacttgagctaaacctgctattaaaccacctatacctccacctatcattactgctacaaatggtcttctatatttcataaacacaccaaacactgaaggctctgtaactcccataagtgcactaaaacttactgtcccaaataattgtttttgttctttattcctagtttttaagaaatatccaaacattgcaccacaaactgcaatatcagatattgttgcagcgcccataaaaattgggtcataccccaatgttgtcacagaatttaaagatataggcatagtaaagtttgctgcaccaaaaactattaagagtggttgtaaagctgcatacagtgcaacaacactccaattacccaatgtatcaattaaaaacatacatgcatagtttaatccatcaccaatccacataccaataggtccaaatacagttaatgtaactgatagggttattattaaagataacactggaactaaaaaatagtgtagtgctttaggtaatatttttttcaaaccttcaattataattcccattgcccatactcctaaaagtattggaataaaactgtttgcataagttgtagcctgtaaatttataccaaataaacttaatccttctacaccatctattgatgacgataataacgtaactgctaacactactgctatatagggatttacattaagtctttttgctgatgctattgcaattaatactggtaagaagtgaaatgtagcacttcttaatgtatctaatatttgatatgtagggctatcactctgaagtatgccagacatatttaaaagtgctaatatacttgcgagtataccagctgcaagtagtacttcaattactgaagtcatagtctctgagactaccacaaagatggaattaaatatacctttgatacctctaattcccttttttctttcactttttatacttgattcacttgaacttaaacctatcatagacataaactcgttatatacatctacaacatgagtacctattataatttgataagcaacatcattagaaactacatcaattactccttttaattttttaatttcttctgtttgagcgatacttctatcatttaaagtaagtcttaaacgagtaacacaatgcgctaccgactttatattttcttttccccctataagttttattatattttcatttaaatctttatatttcatctgattttgcctccagtctttgagtcaccctatttatatgcaacattaaataagtttcttcacttatagatatatcgacattaaattgtgattttatatattttcttatcttttgaacacttccaaatgactttggataaagttgacttacttgtttatataaatctatagaattatcttcatctattgaagcttcatctgacataattctttggataaagtactgtagatgagtagtaaatctcatataatttgttgaagtttcatctagctctacattaaaatgatattttattatagaaactatatctgctaaagttctcaactctacaattgtactatcatgagactctttatttacctccatatttacaaaatgaagtgctattgatactgcctcatcatcaggaagattaattcccttactatcaccaattaattttagtgcatgcattccaatttcaaaatgctttggataaaatcttttaacattccataccaaaggactttttataaattgattcttttcacatcttttaagtaaaaactctaaatggtctagtaaggttaagcttagataatcacttgactttatatttaaagctttctcaccatattcaattatttcattaataagaactatattattggagtctgagttttgtagtagataactaaagtgttctagcatatcgtatgaatctagtatatatgttctctctatttcattttcatttattacttgtcccactctttttttaaagccaattcctttaacaaatacaataatttcatttttacctctttttactaaggctacattattatttaaaatctgaattattttcatatattcctcctttcaataaaaagaactcaagcatatatgtatagagtatccctctatttttcacatatatacttgagttctgcctgctaatcagtaacatactcaaaattatgactacgtcgccataattaaaattcttttttgtttaatttcatattctatatgttatactatccatataaatctgtcaacggtttcctagatatttttttattctataactacaagctctgttatgcgattatctggcaaagtttatatactaaattgatactattttactgtcactaatatttacaatattgtctgaaccattatctattttactattatgaattatcatagtaatgattttaaatataatgaactgtatgttaataaataaattcttaagtttagttttatttaatcactattaagatatattaataggtaaagcttcaaatttagttttatttaaatgctattaagatatactaatatataaatacttaaatttagttttatttaaacactagtaagatatactaatatataaatacttaaatttaattttatttaaacactagtaagatatactaatatataaatacttaaatttaattttgtttaaacactagtaagatatactaatatataaatacttaaatttagttttatttaaacactctagtgatatttttaaataaattttaataaaaatcattctattttgtcataaatcatttatctggcttatatttaagatatattggtggatactttacactttttaattcctcattacttcttaaaagtttattattattttccacatcataaatttgtaacattactttatttacatatagagcatgataattatcactataaaaatattgatactcatatcgagggtcatctttgtaatacactttgtatagtattccttcgtaacttgccttcttggctttttcttttgtaatactttttatattatcttttgaaatatcttgttttaccatatacttatcaatatatgtttcagcatctttccatggtttaatgcagtttttatatacaacaaaccctgttacacttataatacctataattaatactataaaaataactttatattttttcatattaatcctccttcatttattatttaaaacttgatataacgcactaaaaaaaggatgttatcttttttattaaaatataacatccctcatatttagcatcaatatatatgccccaactggtaggttaaaagaccccactgtcagtactttgattaaattgcatgtatgtatatatatttttaacaaatctattatatgtcaacttgtctactattacatataatctgtaatattacatctgctgctttttttgagcctcctgcattataaaagctttttgatagtttagttgcattttctttatattcattgtcatttataacttgaaatactgcttttttaatactttcggacttatcctcttttaacataattcctgctcccaaatgaacaactctcttagctaccattctctgctccgaatgttgaggaaataataccatgggtactccataatataaactttcattaacactattcatcccagaatgagtaataaacacatcagttttttgaagtatagcaatctgttcaacactatttttaacctcaaaattatttggtatatttcctaaacttttaatatcagtacttctaccaacagacataatcacatcaacatcagaatctttaaatgcatttatacagtttttataaaagctaacatttttattattaattgtaccaagcgaaatatatattaactttctttttctctctttaggtttaataatcaactttgatactgatggacctacaaatgaatacttactagagaaggtttctaccattggttgaaattcttttgatgtatatacaatggtatccgtatcattatcattagaaactatagaaataaaattttttacttcatacccttttctttgtaaaagctttatttttttattaatgcgtcttacaccaaaaatcatacgtataatttctataaagttttgtttcatcaactttgctgtatgtttattaaatgcaaaagttgttgtagagcatacatatggaatattaagtttttgtgcaaataactttccccaaaaacttaatgaatctgatacaatgcaatctggattaaaatctttaagttccctacaaactttttcatctaaagaaatagtagtatctactatcatctcaattaatccaggaaaatccttaccaatttttttctcatctccagggagtaattctggaaggtatttatcacaacaaataaattttgctccagcaccttcaattttatctttaaattcattaaaagaataatacaatacctcatttcctctatccactaattcacgaactacttcaatagtaggattagtatgaccatatgcaagaatgctaaaaaatactattttactcacatttcatacctccttttataattttttaaaatcattcttctttacgtactactcccatatgacctataaaatttatcaaatcacgttgatgaacaattcctaatcctctttcctcatctccaagtaccaataatttatctcctgcatttatattaaatacttctcttgcttcttttggaatgacaatctgaccacgttcaccaactactactgctccaaagaaaaactttcctttaggaggtactataatacctgttttttcttccgaatgattaactaagtcatctagtttgaccttgtacaattttgcaagtttaatgcaactacctatatcaggaatagattctccagtttcccttagttaaagatatgaaccctctttatcagtctacttttccaataaatcggtaatatatctctatttcctgtattctttcgttatcctcattcgttattgcttcatgaataaggattttttctatcattgcatttaataacggtgctgtcagttcctttggtacggaatactccttgattaactcaatccacttttcagcacctatcatatcctgttccattttacttaattcttctcttaggttggttatctgctgttccagttctatttgttctttttggtacttgctagacaacatcacaaaatttcgctctgttatcttctcacaggctctatcttcatacattttcgcaaacaaacggtcaatttcattttgtcggttctcggctttcttaaaggcacttgcctttttcttcttttcccgtattcgctctgcattgcctgctttctgtatcttgttcagcaccttttcttcgtcctgctgtactgccttagcccaatactgcaatcgtttcaatacggcttgatacaacacatcataacggatatagtgcatagaacaagtacctttgccaaactgcccgtagtaactgcaagcataataactgtaaggcgttttatttgccgtattcgttgcaaaccgcatagaccagccacaatccgcacacttgacaagccctgcaaatatcggtgttgctttttcctttgtctgtctacgtcttgattttatctgttcctgcacacgatagaacacttctttgtcaataatcggttcatgggtattttccactcgaaaccattcactttcgggcttacgcactttcttcttgctcttgaatgaaaccgtagactgcatattgtgaacgctgttgcctatataaacctcactttttaagattgccttgacatgagcaatcgtccactcataacgtttgctttcgggctttccctcaaagatatgtgcaaaagtaccgtaccttgtaaaattcagccaagacgctgtcggaactttttcctctcgcagtacctttgtgattttggcactaccataaccttgataggctagggaaaagattttttcaacaatccattttgtttcatcatcaaccagcagttttcctttgatgtcagggtgtttcttatatcctaatggagcataagcaccataatgagcaccctctgcaaatttcgtcttaaatgccgatttcactttacggcttgtatctcttgccacccattcattgatgatgttcttaaatggtgcaatctcactttcgcctttctcgctgtctacaccgtcgtcaatcgctatgtaacggacattatggctgggaaaatacaattctgtatattgtcctgtcataatatagttcctgccaagtcgggaaaggtctttcgttacaacacagttgatttttcctgcctctatatcctcaatcattctttgaaaactcggtctttcaaaatttgttcccgaccagccgtcatcaatatattcatcaatcacattcaaatgatgttcttttgcatatagacgcaacatacttctttgtgtggtaatgctggaactttcgccctgtaattcatcatctcggcttaacctaagataaagtgcagtattgtaaatctgttgtttcattgtcagttatcctcctttataactaacccgtgtttacaatacctgcttgcaagtaaagtataacacgggtactttttgccattcaatctatgtcttacaactgcaccaattttatgcgattgtctgctttgctttttccagcataacatcagtcagaagttcctccattgtctttcccttttcggaaaaatgctcttttacaacaatctttgtttttcctctgttgccaatgctacgcttattatttgtcttttcttgcattgtttttacaatatcagcaataacacataccccctttccataatcttttttctaagcaattcaacggcatttgtcatagcccacaggaattccacctctgcatagttcttatgtagccgtacccattgcgtgcgacgctctgaacgttcaagctgtggctgtacgggagtatcatttatcagacagaacaggtcatggcgataaaagaggacaagtcttttacaggaacacaaatagggttcgctcgcttttgcagggaaaaggtcatggcgtatctgcttcaatggatcgctgtctgtcaaacgtattgaattgctttattcagttgtcaaagaacatgaaagaagaaaatcgtctttcctatataccgcgttggaaaagagccgaagcgtaaccaatattcaaaactttttctcttttcactacatatctgtacagcaaacgtccagttgctaagttgaaatgaaaatagttaaactctcttttcctgcaccatatagggaaagcaagtatcagtttgctaagttggtgatgaaaaaaatctgtttttcttttcacaccctaactacccatgcaacaccgtaactgccaactatggaataaaagattttctttgctccatatagggaatgaaaactgtcaaatgttaagttgaaattaaaaatcgtttcttctttcacatcatatagggacagcagccaccgatttaatgacctgttttcaaaaaaagttagatttcctttcctcgcaccatatctgtacacaagcagtcattttgttgcagtttttttgaagaaattaaaaaataccgtcattcccttgtggaacagcggtatctttctcaatcatatctgctatgtctgttgtcatttgtttaatctttaattactgcttttctgttagccttgtatgcctgtcgatttcttccagataatttgctcctgttttcttttcaatctcttttatcatcaataaagagggcatgacctgtctttctagccagcgttttattttatccatattaacagcaacaggtgtcataataaacggaagtgaggtcgttacattatctaaaaatatatcccataaaatataatcgggaaaatctatctgtgtgagaataaagcttgctatggtctgttcgggatttcttgaaaaaacaagttgctctaccgtttgtcctgcttttccattttttaaacgaatttcgaagcggttcttaatatctgtttttatacccttgcttttttgttccttttctttttcatacaagcaaaagtagatagaactattctttgaaccgatataaaaagtttttgcagtatctccatgtgtacccgataattttccgctgtctactgcttcatgggttcttgaacgtttccataccttgttagcataataacgttcccttagaatttctatatccagcaatccgcccatatcattgactgctaaatctatgcgtttaaaaacaccttgataatctatacaacatcttaaaaagcaataccagtctatccctcttacctgtaaaacatattctaagtcccgacaccccatacctcttaattccaataaaacacccatagaactatctttagaagcatttacactaatatccccatagatatactgttcttcataagcatacattccgtaatcttcatgtataaaatattcgcttttcattgccagcacattttttataatttccaatgcgtctgtggtaggaaaacgaacacgcagatagtcaatcgttaaagtgaaaggctgtgtacaattacaataatcaagataatgtaagagtatatgtttcatttctttactggcttttgtttttccgttttcaatttcatttaagttctgcctgttgatttgtagttcctgtgccagtcgtgattgcgaataatcacagacatttctcttttgctttaatgtttcaataaatttcatatcattcatgcttcattcctccaatcaaaaaaaggcatatactcataggagcatacaccttgtatcttatatttattttctattgatatgctgttttagacctgtcgggtagaaagaatagggtgtaaagtgaaataagttcttacaaccttataaatcgttgcatatcagcagttttatatttgtttttgctcttgtcttttgtaatagtccccccctgttagataacgggggcttagaaagctcgcaggctcgccaaaccgccaaagtgaaccgccacctcgccagcaagctggcgtggcgatatgtcttacgaccgccaccgctggcggatcgcttcggcggttcgtgaaatttatattctatctataataatcttaaaatctgcctaaccaaaatgaaatggaactaacatattaagtataacagcaataacaactgcactcaatatcatatacgttgtctccctaaaggtgttacgttttaaagctattaatgcacaaccaaagactatcacttctaaaattgaatacacatcaaaataaatccaaccataaataaatgtaaaattaaataaaattgcaattattattactgaaagtataaaagatattttgcttttccccttagcataccaacaaataaaagctaacaatggagaaatgacagtaaaaccaagccaaatcattgcataattttttggaaaaaatccagcaacaaaatacgaatataggtaataacttgaaaccattccaatgaaaaatactaacacatttaatgatgctcttatggaagaatgactataaattgcaatgtacaaagcaatcaataaccatatagcaaaacgaccaaaaaaattactaatatctaaatattcaaatataaatggtaaagtattgcttgctgtagtatctaaaaattttgcaaaagttcctaaaactattccaaaacacagtataaatattgtatttataattttcctagtaatagatatttcattatctatacgccttatctgactcaaaaacttattcataatgcacctctaaattcaattttccctatcaaatgttaaatatcttgtgccttggaatgtcagctgtcctttatctccctctgcaagcactccatactctgagccagatacagacagctctattctatcaccactatctacttgaaatgtcacataatacgaggtgctggaaattgtatgaaatccatgtgctcctgatatatcaccagcgtttggttgattgttatgagtggtattctgacgttttgctactattcttgctgacacagttaagcgaggagaattattgtttttaaaccaagtagctattcctttcacaaaagtgaaaacaattattataaaaatcagtataaacattataggaaataacatttctattagattaaacaatctctttttcctccttaatgaaattctcctttaagtataccatgctcctttaagtattgtcatttcttttcttcatttaaaaagttacttatcagtctaaaataattaggaaaatgaaataatttactgtgttgcattaacgaaaaagagataccaacacatttatgtagtatctctggcttaatagcaatattcttttctctacaagcaggtaaacacaggttatttcagtaatatccttttgtttgggaaactccactttcccattttgctattgattgtctagaaacattaagtttttcagctaattcttcttgtgtatactggtggatttttcttagactttttaaattctcattaatcatatttttcatacctcctatgtttataatattggatttattatttaaattctatcaactaatcttaacattcatatatatatttatatacttttattatataaatttattgttcaggtaacatgtttccttaagttataatagataaaagcaaacacaaatctgtcaaccttcgctaaagtatttaagttagggtcatttacattgttaaatacttctacatcttaaaaagttttactcatcaatcaaatgaaaacttgcaataagaattaaaatcataataacaaaagtgctgtctcaaaataaagataatcttttttcattgttgaaatgataaaaatatatttaatttcatgtaaaaaagtgtctcatgaactaaaaagttcattttgagacactccttttttataataaaacaatactatctacgtctttttaactatatatctagcgcagcatgatgcccttggtatactgcatttgttattgtagatgcacgaacacagtctccaatttgagcaacatatggagcagaatcaagtaaagtgtctaccacttctcttcttggtttttgtccaagtgcacatattactgaggttcctggaatatttattttattcccagatttattcatacatactacaccttctgttgttacacttaaacccttatgttctgtatatacatatataccttgtctttctatttcttctaataatattggacgatgccttatatttgcatctggggcaagttctgctctcatctctactaagtgaacagtcttctcttcttgagctaagtgaattgcagcctcacatcctgctaatcctccacctaaaactattacttcgtcagtgactttttctttttctacgtaataatcattaactattactacattttctccatcaagaccctctattggtggaacaagaggttcagaccctactgctataattaatgcatcgacattttcattttcaacatattcttttgtaactgttgtatttaaacgtacttcaacacctaaatcttttgctatttttccaaaagtatttcctaattcatacattttatacttaaatggaagtgcttgttctccctttaaaattccacctaattcattagttttttcacaaagtattactttatgtccacgctttacagctgtaatggctgcttgcaatcctcctggtccaccacctgctattaatacttttttaggttttaatactgaaacaacttcagttccatctaattcacgtccaataagtggattaacagtgcagcgtcttgtagaagtggtagcacgttctgccatacaagtgaagcatcttaggcatttcactattttttcatcttgattactcataacttttcttggtaattcgtggtcagctagtaatgcacgagccatgtaaataacatctgcttttccactagcaattatctcttccatcatttctgggtcatttaatgctcctatagtagcaactggaatatttacatgttttttaatttcttctgcaagatatacgttacatccatgttctaagaacatagaaggatgtgttactgcaaaccctctttggtatgtacctgctgatacatgaagtaaatctactcttgattccaataatttagcaatttctgttccataatctaaatcataccctccctcaaataattcagaaccactcatcctaaactctattggaaatcctggacctactgctttacgaacactatctaaaacttctttagcaaaacgaactctgttttctaaagaaccaccatatttgtcagttcttttattaaagtaaggtgataagaattgattgattagccagccatgtccaccatgaatcataatcatctcaaaccctgctctcttagccaatgctgcaacatttccatatgactctactatttcagcaattatttcttctgtaagttcttttatctctaatccatcaggacgaacactaggacttactccccattgtgataatcctcgcttcttatctttgtcaactaaataagttcctgaatattgtcctgaatgagatagttctacacttggtattgctccatgacggcgaattgcatctgctgtataagtaaaacttgctaaggaatcaactatttttaagtctagatgatatgcatgtgaaccatctgtttctggatgaaccatacattcactaattgtaactgcacctgctccaccttttgctcttaattcgtaaaaggctgttgattttgagccaattgtacaatctgctgttatgtctgttccccccataggtgctgaaaacattctgtttttgaatgttacatttccaattttaattggcttacatagatttggatattttctttccattttttatatctccctttattaaattttctatctttaaattttgtattttatttatatatttatataaaaatgttaatataaaacctattaaagctataattatagctataatgaaagccctttgataattgccatctacagaatatacatttttcatcactgcaggtccaatatatcctgcaaaagcaaaaccaataaacatgattccataatttacactattatttttaggtccaaatttatctactgtaaatcctgggaaaattcccataaatgaaccaaaacatatacctataattattattccaatatagaatgttgctacatctccttctcttgagaataacaaacataataaaccaaaaattgaaataactaatgcacctgataaagtatttattctaccaattttatctgatatatatcctgcaacaatacggcctaatgtattaaacaaggctaaaattgaaaccactattgctgaatctgaacttgtcatcccaatcatatttgttgctagagaagatgctaatgacacacacattaatccatagaaagctccacaagttaatattataatcattagataaaatataggtgttgaaagcatttctttccaatttttattaataacaactcttacttttccttttttctctggtggtacccatccttctggtgtgaaatctgctggacattttttgataaagaaagaagaaacacatacaattataagaaatactaaacctattgatttaaatgcagaagttactccatatttattaattatccaattagcaactggaggcattattactgaactaaacccataagctgctgttgttataccaccaactaatccacttttatctggaaaaaatttaattgaattacttattgtacatccataaaccatgccaaccccaagacctgttattatcccatatgataaaatcaacataggcaatccttttgagaaacctgccaatatcatacctataccaaaaattaatcctcctacaaatacaacttttttaggaccaaatttatcatttatcattccccctgtaatcatagtaataggtccaactgagtttgtaactgtaaatacaattgctaaactagcagctgtaaaagttgttccagcaagactatttaaatgttctgccataggtgatgcaaatacactccacgcatatattgaaccaatacataaattgatgaaacaacttgcaattaatataatccatcttttttgtgttaaattcattactctcctcctcgataaatttattaaatagaatttcttagttaagattatcacaattttttctatatgtaaatataaacatgtaaatacttacatgtttatatttacataatttcatttttatatatagttttatttattttttgttcctcataatttaaaagttcttattaaaacatagctatattaattaattcaaactaaatatatcgtgttataataagtatgtaattaaagaaagaggtgtatttatgcgaactttaaagtatgcaattttaggattattaaatagaaatcctatgactggttatgatatcgtaaaggagttcaattttcaattagctgagttttggaatgcaaagcatagtcaaatatatcctgaactaaaaaaattggtaaatgaaaagcttattgtatatgatattaaaattagtggtgatgtattagagaaaaagttatacacaatcacagaaaaaggtaaagatgagttcttgaaatggcttgaaaaggatgagccaatggaaagaacccctaaggatatttttcgtcttagaatgtatttttctaataatttagatatagatactaggcttattttactagagcatcaattgcttcaacaccaagaaagaattacgttcttgtacagtcaaatggagcgttatagtgaagttcctcctcttgatagtaatgattttggtgattatatagttcttgatggagctattatcagggaacaaggtgctataaaatggctaacaaattgtattaaccatcataaaaatttggataatactactttgaaataataacttattgattttaatagtgtatttaattatagacattaaatttataaaaaagactgtacacaactttgtctttgtatacagtcttctatggttgattattcaagatagataattataatatttaaaacagttaatataaaagttaaatattttttattaagctatcaattttatcttcttattgcccttcaaaatcatctttatatttacaatctttcacatgaaaattactatctcttcttatataaaaatccagttgatattttgttactaaatttaatggtaatcaaattctttaccaatgaatataaaaattactaatgtgttataattttcttaactactaaattttacatacatttgaatagaatatttcaataaagtactataataaataaaaaattaagagttaaaataaaaaatagttagggagatattattatgattttatattttagcggtactggtaatagccgatatgtggctcgtaaaattgcacaagaattaaatgatgaactgatatcactaaatcaacttataaaagaggaaaaaacagatgaattaatatcagcaggtaaaccattcatattcgtatgtcctacttatgcatggagattgccaatagtggttacagattttataaaagaaacaaaatttctaggagacaacagagtttactttgtaatgacttgtgggggagatacagcaaaatccataaactatattcaaaaactatgtaaatacaaggaatggcaattaaaaggtatggcagaaattaaaatgccagagaattatatagctttattttctacaacagacaaagaaacatcaaaacaaatgattaaagaagcagataaacaaatatataggattatttctgatatacgcaatgaaaatgaatttgaaactattactcctagtggcttaggaggtacaattaaaagtggtataataaatacagttttttataagacaattattagtgccaaaggatttcattatactgataaatgcattggctgtggaaaatgtgtagagctatgtcctttaaataatattaatttaaaaaacaaaaagccagtttggaaaaatagctgtactcattgtatggcatgtatttgtggttgccccactgaagctattgagtataaaaataaaactcaaaacagagaaagatactatttagaataatatattcttaatatttaaaccattataaaatgaactatacccattgttttatacagttttacatattttaactgtctcctaagatgggtatagttcaaaagatagtgtctcaaagtgaactttttagttcctaaatcaatctttttgtattaaatcaagtataatttaatcaccttttcttatatcattttcactaatatgttgtattccaacaaatataagatttattagctctgttagtgacttccattgtgatttttttgaatcaagataataataatttttcgttccttctctacgcaaattaacaatctctgcttcttttaatatcttaagatgatgagatacagcaggacgagaaagatgtgttttttttgtgatttctcccactcgtataccattaaaatcactctctaagagagcaattaaaatcaattgtctagtctcatcacccatagcagagatagctttgcgacattctttaaatttagatgttatttcttgcattctttgttgacattctttttccataaaatccaccctctcttataagtatctaacagttgctacttctttctgtgcagtacgtctatatttaacatctgggtatccaattactaatgttgtaagaacatgattactgcgttttagacctaaaagcttttttaattttggcgaattatttgctacatctgaaaaatatccactaaataaaacacctagaccataagactctgccattaatgccatatttgatgctgcaagtgaaccactaatcttatcttttgtaattatcattattgcaataggagcatgcttaaagaaaaagttatcgtcaatctcaacttcttttgaatatttaatagctatatttgcaataggttttatttttctaaaaaatttcactgcttcgttttcataaattgactttttattgtctaaaacaatatatgatacatcttgtgaatttttagcactaggggtatacctacctgcctcaataatttgctttacaatttctgaagaaacttctttgtctttaaatttacgtatacttcttctagatttaattgccattagtaattcatctgaatctagctttggcttatttgtaagttctataggaggttcatcaaatcctgtcaaggtaatagcttttgtgggacatattgctgcacaatgtccacacattagacaatcttgttttttaattactgactttttattttctataattatattgtttactggacaatcatttttacaaagcccacatccaatgcaaagttctttgtcaacttctattatatgttggtatttcatattcattcatctacctttcgtttattagtttaaactattataacacgtagacattttttatattcattggtaaagaatttgattaccattaaatttttaatttctctattaaataaatttttcatagaattttaaagtatcatagtttatacataataaaaaagacaagcttaaaacctaagctcgcctttttcatcttttattacaaagtaaattgcacttacttcccatacttcttaacaattttattttctaaaattttatttgtgaatcatactattgcataaatacaatgtaaaataattctgtattgattttctatagttaaaaaagttaaaaattatacttattattaatttttatactcttcttatttaatacaaatttcttatttaacatagatttcttgtttaatataaatcttcaccatttgaagcaattactttcttataccattcaaaacttttctttttcattcttcttagacttccattaccactattatctctatctacatatataaatccataacgcttttccatttcacctgtaccagcacttactaaatcaataggtgcccatgtagtataacctaataaatcgaccccatctatagaaactgcatcatgcatagcttttatatgttctcttagataattaattctgtaatcatcttctacataaccattttcatcagctatatctttagcacctaatccattttctacaataaatagtggcttttcatatctatcatatacatgatttagtgtaattctcaaacctaatgggtcaattggccatccccattgactgtatgaaagatatggatttttagcagatgtaaatatgtttccttcagccatatcatctgcattttcatcagttctaacacaacggctattgtaatatgaaaatgaaataaaatctactgtatatttattcaataattcaatatcaccaggttccatttctggtgtaatacctttttgctccatatactttaacgcatagttaggatatttacctttagattgtacatccacaaagaagtaattttctctatctaactttgtagcttcccatacatcattaggattacaactataaggatatacacttccagctgcaaacatacatccaactaagttatttgaatcaacttcatgtgctattttagttgcaattgcactagctacaagctcatgatgagcagcttgatattttatcttttcaacatcttcaccttcttcaaagcaaataccagcacccataaatggagcatgtaaaatcatatttatttcattaaaggttagccagtacttcactaatcctctatatcttctaaagataacattgcataatttctcatagaaacctatcatttttcgattacgccatgcaccatactttttaactaaatgcattggacaatcaaagtgtgtaatagtgactaaaggctctattttatattttttacactccttaaatatattttcataaaattgaagtcccttttcatttggtgtttcttcatcaccttttggaaatattcgactccatgcaatgctcattctatatactttaaatcccatttcagcaaataactttatatcttctttataattatgatacatatcaataccagttttagctggataataatgctcatcatcaaaatcaaacatttttagtttccctgtaataactgctgttctatcttttcctgttggacatacatctacatttgccaatcctctttcgtcttcattgtatccaccttcacattgattggctgcagtagctcctccccataaaaaatcatccttaaaactcatagtcaaagcctccttaaattataaccaaagcactagcttatgctaatgcctcaatttttactaaaataagactgtaattagattatcttctaattcaatatttttactttctgtttctactacatctaaaaattgtgatgaatttgtaataacaattggagttacagtactataccccaactcttttattgcatcaacatcaaagtttaatatagtttgaccttttgtaattctatcaccttgttttatacatgcctcaaaacctctcccttctaattgaatagtatttaatccaatatgaataagcacttcaacacctgtatcagaaagaatccctatagcatgtagactaggaaataaggttgtaactacaccatctactggagcaactacttttccatcactaggtattattgccaccccttgacctagtacaccagatgcaaatgctgcatcctctatatcacttaattttaatacttcaccttttataggacttgctactatttctctttctaatttagtagacttgacttcttttatttcttctttccccttatttcttacttttttagactcttctactttctcatctttatataaaatcatagttaatacaaaagctacgaccattgatatagctataccagaaagagctactattaagttgcccattcccccatctggttcaatcattgctggaagttcaaatattcccatacctccagttataaattttctaagattaaagaatccgtagaaagcgcctccaatcccactagcaatacaacttattataaatggtttctttaaaggcaataatactccataaattgctggctctgtaactccaaatataccagatataaagtttggtattgtcatctcttttagttttttatctttagtcttgaaaaatattgccaacacaactgccgaacttgcaaatgtacaagcaaagaatggcatcataacattatcatatcctaaagtcataacattgtttatatatacaggaataaatccccagtgcataccaaaaataacaagaatttgccaagtaaaccctactatagcacctgccaatagtggactaaaatctcttattgaaattacaatttgtgaaataagtgtagaaccaaatgttgcgataggacctataactataagtgcaacaggcactgttattaataatgtaagcattggcacaaagaaaaacttaactaaatctggaacaaacttattaaataatttttcacacctagaagcaaaatacactataaatataattggtacgactgttccagtataatcaattgatacaattggtagtccaaagaaatcaatatatactggtgatgcaaacattgttcctttaaataaagtgtacatcacatctgctcctgctgatatactgctaccttgtatagcaggataacatactgcagctcctagtgctaatcccaacattggttttaatccaaacttcttagctgaagtatatcctaagaacaaaggaaggaatgtaaataatgcatctcctgctgcatttattaccatataaccaccagatacatcactatataatcccattgctacaaataatgcattaaatcctttcagcataccacaagctgccattattcctaacactggctgaaaaattcctgatattatatctatacctttatctagtatattacctgattttttagtttctgaacttgtacttgaatcatctaaaccaattatttcaactacatctttatagacagcttcaacatgatttcctataactacttgatattgtcctccacttttcattacagtaacaataccttccatgttttttaatacattgtcatttgctatactttcatcttttaaagtaaaacgtaatcttgtaatacagtgtactaatccactaatattttcttttccaccaacattgtttactatctcttgtgctaattgtttgtattttcccatttttctcctccatatttcgtttaaattaattttttgaaatttgaaggtttggccaactcaatgttaccatccaaccataggtataattttgttagtatcactcctttcaatcattcttaatatactactgaaaaattatttcacttacatatttgagtctttaactactttagctaaatgtattgttaaatatataagctcatcatctgttaatatgtagttatattgttttttaatgaaatttttaattttaactacacattcaaactctttattatatttagatttaataatgcttagtaattctttgtctgtctcaccttcatgtgcactatctaaaagcaatctttgcgcaaaaaactttaaatgcattataaatctataataaaacactgattcttcatgaaattctatcctaaaatgatacctaactatgctaagtacttcttgtattaacttcgtaatatcagatgccaaagtatgaccttcacttaactgagcattcactatatgaaaggctataaatccagcctcatcttctggtaattttatacctgttttgttttcaataatatctagtgctttcattccaatttcaaactcttctttataaaatcttttaatttcccaaagaattgcattttttacatttattccttctttcattctttgaattgcagaatatgtatggtcacttaaggatatgtaaatactttcatttagcttcttgtttaactttatttgtgcgtattctataatttcacttgataatttcatgtgttctataggaatattattgagtaattcttgtagtttgtttgatatttctttatttgatattctaaatactttatttactttagttttatctattagattgccttttgatttttgataaccaattcctttacccataacgataacttcttcatcattatcatctaatgtgattacaacattattgtttaatatcttattaattatcatgattatcctccttttaagcataaaaaaagcttatccataataatgggcatactccttcctaggatactgctattattaatgaataagcttagcttgtacttaaacaattactacctaattccaattaatatgataaaacatcagacatattttgtcaactttttatttccatatacttcatcaatcttttgtgttgctttttgtcagttataataattattatcattaatattaacttatttctttgcatcaatataaatacaaaacaagttatagtcaataataataaaaattctattaatgtaaatagttaatattatacttcctctactacattatctgtactttccttaacatttttttcaactccaaaaacatatgtcataataaatggagcaaccaatgctataaatataactataagtccatttactatatttgaaattcccttttcccctgataatccaagtactgccattatactattttgtggaacatataaagtcacatgagtaattcctgcaaataaccctgcgattcctgctcctatagatgctaacatagcaggttttttaagtttcaatgtaactccataaagagctggttcagttatacccatgatagctgatatccatgcagctgatgctaactgtttcatcttactatctttgcttcttaatgctacagctaatgtcgcgccaccttgcgctaaattagcacaaacttgagatattaatattagcgattcttgtcctgtagttgcaaatgctgatatgaatataggagtcaatgcatgatgcatccctgtcataacgataaatggcattgcagctgctaataaacaaaccattataaatcctaaccttccttgtagtaaatttattatactagctaatccctctcctaagaaatttcctattggtccaattactattaatgctattggcgcacttattaataatactaaagttggatttaaaattgtttttaacatgctaggtgttaatttattaatgaatttttctatatatgacatcatccatactgttaaaagtgcagggataacagatgctgcatatataacaccttgaattggtactcctataaatgatatagggtccccacttgatacccatgcagagaaatttggatgtaaaaacacacctactactataactgctattgatgtattaacattaaattttttagctgcatttattgcaagtattataggcataaagtaaaatgctacatctcctattatatctaatactctatatgtacttgaatttgatgatagccaattaaaagtggtacaaagagataatataacttttatcatcccagatgctgtaagggctggtatcataggtgtcatacaaccagttattgtatctattatattatttaaaatactattttttttattttcattttttatatcgcttttaatatctcctgtggtatttatccccttatttattattgcattaaatacaacacctacctcattacctattatgacctgatattgagttgaagttgagtttactccaactaccttatctatagattttaatttatctgcattgactttcttttcatcttttaagatgaaccttaatcgtgtcatacaatgagttaagtcaattatattatcctttcctccaagtccatcaattatcaattgagctacttcttcatatttattcttcataccttatcctctcttttaaaataatttttaatataattttaatccaaattaatctttttactccaagcttgtaatagtgtattgtaatttaataagctagtatcttctacaatatggtcacattttcctagtacttcttttttccccacaccaattgatgtcatattggcagcatttatagctttaatacctgaataagaatcttctattcctacacaatcatattgttttaaatttagcatcttgctcccttcaataaaaatatcaggatatggttttcccctttctaataaggatggatttactatacaatcaaattcatcttttattcccaaagattctaatatcctaggtgcattcttactagcagatgctattcccaatttcacattattttttttaagttcttttataagctcatttatccctggtaatatatctttatatgttaatgagtttattaactttatataaatgttatttttttcttcacacacctttaacttttcctctttagtataactatctactttattagcagataacaatattttatctaatgattcttccctgcttatgccttttaatttttcattaaaagtttcatctatttctatatctagcgattttgctatctcatgccaagcttcaaaatgatacttagcagtatctgttataactccatcaagatcaaataagactgctttcatattaattactccctttaaaacaattattaacttctattatgttctttgataattttatttctttattatcatgtaatatgcttatgtttttacctttgattaacttataataagatttatattcttctatatttacagaaactaaattatctctaaataatatattaaatttaatatttttccagtgtttaggtatccttggttcaaaacttaatttatccttttttattttcattcctgcaaatccatatactaaactcatccatgttccacccatattagcagcatgtattccatcacttgtatttttttgtaggttattaatatccattaatgctgtgtccataaaatagttataagctttttcatgatttccaatttcacttgccatcattccaaatattgaccttgacaaagatgaatcatgagtagttattttttcatagtattcaaaatctctcttcttttgttctaagctaaactcatcagggaaaagcaacgctgaaagtacagtatctgcttgtttatttacttgatatctatatattgttaatggatgataattgagaagtaatggatatttttcttttggtgtatttttaaaatcccatactgatttttctaaaaatgaatcgtcttgtttgcttattttcttctcttcatcatatggtaaataaatattttgagcggcatttatccagtcttttacttcatattcttgtaatttaacttttctaaatacttcatttgaaaataaattatgcttaaatttatctaccatctgtactgcatatattaaattatatttagccattaaattagtgtagtaattattgtttactattgctgtatattcatctggtcctgttactccatttatacagaatttattattttttaattctatataatctccaaattcaacccaaaatcttgctgtttctataagaatttctaagccattttgcatcataaattcttcatcattagttgcttcaaaatacgttctaataccataagctatatctgcatttatatgaaactgtgctgttcctgctggataatatgcactgcattcattaccatttatagttctccatgaatataagcaacctttatttattccaagttccctagctctttctcttgatgcatctaagattgagtatctataatctaataaagctctagcaatggatggttgagtatatataaaaaatggtaatatatacatttctgtatcccagaaataatgcccctcatagccatcacctgtaagaccttttgctgatatattagtctttccatctcttcctgctgattgataaatatgaaataaattggtttttatacccagttgaagagttttatcgccttcaatctctacatcagaggttgtccaaaactcattcattttctttctctgaatatttttgactttatcaaatccaatattacatgcttctcttaaaaccaattctaatgattttaaatgtgcttctgattctaaacattttaacgactccagacattctaatgattttaaacgttcttcatttagatttaaatcagaatatactctactatagcctacaacaatttctaaatttaacctttcatcttttttggcatagacttctatttctcgctcaatacattcatctgaaacattataggtctcatttgtaatatttccacaagtaatatatgaatcaaacccacaccataaccctaatctacttctttctgtaactaaattcataaaatacttattgttatatttttttacattaattttaaattgcttcttatttatagatgccactcttgggtcatctactttttcacaattaaacttctccatactattttccattttatttttaaattttatttttccattaaaattcaatggtgttattgtatatgaaatcatcattaattcttctatatcttgtgatactaatctttctatagatactttaacttttctaccacgagagttttcccatataaatgaacgtttaacaattccttcatttaaatctagtatcctagtatgttcacttgtaataccttttgataaatcaaagcaatctccttcaatagagaaatttactatatgagcattaggtaacttacagatagtctgattttgttttgcatagccataagcgctttctccatatgtaattggagattcttcataaaatccatttacatatgtacccatattatctacatactcattattaaaatcggactcttcaatattccctctaactcctaaatgtccattagctagtgtaaacaacgtttcattggattttattgtatccttactaaacccttgctctataagttggtccttagtagtaaatattaaactcataataacactcctttcttaaaatgaattatgcatgagtttccatatcattaaataaaatttctccatctgtttctattacttttttataccaaaaagcactttgttttttagttcttttaaatgagcctcttccatagtcatcagaatcaacatgaattatgccatatcgttttgtcatctttccttcacttacactggttacatctatacatccccacataagatatcctataagctctattccatcttcatttactccaagaatcatatttttaatatgttctttcatgtaatctatacgataatcatcaattatttttccatcttcatttacaatatcttgagtacccagtccattttctactataaataaaggtaactgatacctttcatataactgattcatagttattcttaaccctacagggtcgttttgccatacactatttgattttggaagatatggattttttatggtttctggtccgtttgcctttgatttttctaaaccttcagctctagctgaactacaagcactagaataatagctaaaagatacaaaatctacagtattatccttaagtgttgataaatcttcctcttttattattaattttatttgatttgattttaaataataattcataaagcttggatacacacccctaacttgaacatcagaaaaaaacaaattatgcctttcatgctctaaagttgcaaatacatcttctggtttacatgtgtatggatatgtttttccagcagctaacatacacccaaacttaaattctttatttatataccttcctatttctatagtttttgcattagctaataattgatggtgtgctgcttgatattttttctgaagttgattttcatcagctataaaagttaacccagcacctatatatggaatatgaattatcatattcatttcgttaaaaggaatccagtatttgacatcatctttatatcttttcatcaaaatttcagcatattttacatataaattaaccactctcctatcagcccacccagaatatttttcaactagagaataaggtatatcaaagtggcttatcgttattaatggctctatattatatttttttaattcttttattatattatcataaagttgtaatcccttttcatttggttcactttcttctcctgttgggaatattcttgaccaagatatagaaaatctaaaacatttaaaacctatttctgctaacattgctatatcttctttgtaattttcacaaaatttaatccctatatgacttggatagtattgattattttcatttaaaatattatcctcatctaaacatacatcttttaatctcttatcatttaatgggagtttatcaaactgagataaaccttttcctccatctaaataaaatccttcactttgattggctgaaattgcccctccccataaaaaatctttccctaatttcatgcatctacctctttcacagtataaagttttataatttctatctcatatttagttataagatttttttcatactataccttttaaataattcaatttaaaaatccaattatattttttactcactataattaatattgtctattttcaatactttcatattaaatatcaatattagatatctatgtatataattatatatatagcaaatacatttttatatcctcattattgttatcttattctcatatattgctgtatatttatatatataaaaggatttatttcgaaatagagattgtattgagaactaaaatttagactttataaatgaatggaattttcattgttgaaatactgaaaatatatttgatttcatataaaagaaagtgcctcatgaactaagttcattttgaggcacccccttttttctccaagctattatatctttttttaaattctaatggagagactccaattttttctttaaatactctgtaaaaagtttttgtacttccaaaaccaacttcttcaaccaaatctacaatggatatattgttattaagtaatatccactttgctttttctaatctatattcatttaaaaaagttataaatgtttttcctgtattttttttgaaaaatttagtaaaataatatacactaaatcctacttcataagacacatcttctaattttataggttgtttataatttttttctacatatttgaatatattgttcaatctctctaatatctctttagagtttatttcatattctactgtattttcttcaatttctctaggaatctgtctatataatataggaattaaattatacattttaccttttattgcataactatatccttctattttgtataggtcttcattgtagatatctatcaatatatcgaaaactgactttcttatttttgctgaccaatctctactacatttttttatactactgaataaattaattaagctttctttttcctcatttaataaaattaaatcattaaaaaaagatatatcaaattgaaatactaatctttcacttcccggtgatggcagtatataatgaatatctcctccttttattatcactatctcgcctttttttaattgcataggcttgtcatttataaatagatttactacaccttctgttataagtaatatttctatttccttatgccagtgtggtgttgttaatacttctccttcatttgatagactacgaaaaggaaattcatgtattaatttaggcatttctaaatatattgccatagatatcctctcctctctagtgtctaaaaattaatctatactatttaaaagaatacacattttattttaaaaacctcaaatttataatttatacaatacctacacttcataaaatatatctaatatttctttttttgtatgtacatttaaaagtctttcacttatatttttaccacctaaaatgtaagctattttagatattaatatcatatcttcattgcctccagattgtggcatagcaaacataattattacctttacaggtaagccatctatacttggccaatctacaccttttttagatttacctattactatggatgccttctttacatattttgtttttccatgtggcatggccatttgataacctatactagtagagcctattttttctctatgttttaatgcctttataaacttactttttaaagttatacttcctgtatcgtataatttatctactaattcctgtattatgccttcttttgtagttgatttcaaatctaaaataatgctttcttctgttaatatttctctaatttccatttgttttctccaatagattattcttaaataatattttaatatcctctttgctcttgcaatctattatatagtttatatagttcttttgcctatataaatttgatatttccattaaaatattctttaaaaaactttgattactaatttctaaataaatatcaatcgttctagtaacattattgatattcattatccctttatttaatttactttgcttatgtatatatatattcaaatcttttcctaatgaaatagattcatatttactccctaaattcacacctattaaactttccatctgagctacatcaaaattaaaatatatattatcttctaaatacattcctaataagtttgtatctaagttcatactttttttaggtttagaaagtaaagcattttttatattattaatatcactttccattaatagtactgatacaactatatgtaatttatctttcaaatctaagtttacagtagatattacaaagtctacatcatctaaatttcgcttactcaactgatgcataggaactatatcaactatagtccattcaggaaattctctttttaatctggctgcaaggagctgagatgttccatatcctgtatgacaaactactattactcttttactactcatatttctttctattgccgcttgaaaatatgtggcaagatacgaaacttcatctatactaatattcttcagattatcatactctgtcataatatttatagtcatcatacataatcccagcacatctgaaaatcgctcttgtatctctcctaacaacgggttttttatttggatatcatatcttaatctgtttaacataggccttacatgagatgctagacttttttgtagtaagtcatcatttttgagatttatatttaaaaattgtgacatattctctatcattatagatgaaactttttcactttcacttaatatatctgattcatcattataactactattattttcgctactaaatccagatgataccaaaaaaatatatatgtacataatttcatctttcgttatttttactctgtatctattttctattttatctataagtgtagtgacatttttatatactaactcgtccaaattatctacagaaatttctctttcttcctgagattctatttgattaccttcttcgattctctttaaacatataagtatatgggtaattaaatttatatagtagggctgatttatagtatatcctaaattgtattctaattctgtaattatagtttctacaaatataatagaatcaatatcaaataaatttatcaatgcactaaatgtagcagaatctaatcttgttaactcagatatatcatgttgttcataattttcatctaataaatcatccatcattttggcaatcgatttccttatatccacttctttacctataatcttagttccttctaaagttttattaagttttaaattgtattcttttatccatgcctctatatatttaaaatcatttactatagaagttttacttacataatatttatctgctaactgatttattgaagttatattatttgaatttagtaataaatactttaaaatctccattcttctctgctctactgataaagatttattttccttcgattgtatatttaaactattaattaagtctatgttcttctttgctaaatcttctattaatattccatagcctctttttatatcaatttttatattaaaagtttctaaatatttctcaatcatcttcaaatctttttgtaaagttttatcagatacatttaatttatctttaaagtattttataggtctatatttattttcgtttagtatcaatttaagaaattcaatttgcctcgacacaagcatacttagccctccctacctatgtttatatatttctatgtttatattaagtactattttaacatatttactaactatgtaaaattactaagatacttctgtatcataaaagaatttatgatacaccttactaaattgatataatagataatataatttcaaaataaaaattaaggatatttagaagtagttaactgattctaaatatccttattattattctatatacttgttgttattccattacttatttttactattatttataatttaagcaccaagtaattcaacttcactgttttcacttcttatagtaggctttgctacccctataatcaatgctgttattactgtaccaatcaatatacaagctatatatgcaactggtgcactacatgcaaatggtattacaaatattcccccatgtggtgccattaaagttatatctaaactcatacagattgccccacctatacaagaaccaattatatttgctggaatcattcttaatgggtctgcagctgcaaacggtattgcgccttctgttatgaaagatgcccccattatagcagttggtagagatgactttctttcttctttagtaaacttatttttgaatattaacatagctaatgatatcgctaatggaggtaccattcctcctaccattaatgctgctgatggctcaaatatattacttgaaaacatagccaatccaaaagctgaagctgttttattaataggtcctcccatatctgatgccatcatccctgctaatattgcacctaataatactttattagttccagacatactttgtaaccaagattgtaaagcttcatttaaccatgatgctggcgtattaactacaaagaacattatagctccactcgtaaatgcaatcaaaagtggacatatcaatacagcatttactccttttaatacatctggtaaattttctgttatcttcattactcctaaagctatatatcctgttgcaaaaccagctaccataccacctataaaccctgaacctccaataactgccataaaaccagctatcatagcaggaggaaatccttgtcttcctgctattgatttagctataaaaccagcaagtatcggtataaataacttaaatgctgaatcgcctccaagttgtccaaagaatccagctatagggttgtatgtttcatgagttgggtctgatgcaaatataccaaacataaatgctatggctataccaattccacctatcactacaaatggaatcatttcagatacaccactcattaagtgcttataaacaccctttgtctctgacccttgaagcatttcttttgaatcttctaaagtctttccacctggtttaatttctttagccattccattttcagcgtttataattaaatttttagctaatgaaacattcttagcatctactactttcttttgtagcactttctttcctataaatctactcagttgaacttctttatcacaagctattattacgtattcagctctttttatatcttctttagtcaacttattttctacacctatagctccatgagtttctattttaacttcatatccaagttcttgccctgcttcctctaatgctttttttgccataaaagtatgagctatacctgttggacatcctgttatcccaactataagacctttattttgattattactaaaatctcctgattctgcagctttattattaaatatacttaatatttcgtatggagtttctgcacttagtagatgcttaagaaaattttcttccattagatatgtagctagtttagatataatcttaagatgttcatctgaacctgattctggaactgctatcataaaaaatgacctaagtttttgaccatcattatctgtaatctctctatctgttcttaaatacatcattacaggttgatttactacatttgacttagcatgaggtatagctattaaattacccatattagttgatgattctttttcacgtttattaatatcagctataaacttttctttattatttatataatttccatggtacaaatgatttgccatataattaattacatctttttttgtttgtaattgtttatctagtacaatacaatcgcttcgtagtattttacctatcataaattctcccctccttttaatttgttacctcataattaatttttatttttataaaagcactttaacttatctatagcattgaatagattcattttaaactctataacttctcttgcagcttttatacatggtggatatatagtatctggctcatataagcttgggttttgttctaatagttctctgcacttcttataatatgccgacttaacatcactcgaaatatttattttacaaactcctagtttaactgcttgtgctatttcttcatctggatttgatgaaccaccatgaagaactaaaggtatatctactacttctcttatttcttttaataaatctagtttaagctctggtttaaaaccttttggatatataccatgtgctgtaccaattgcaatagctagtgtgtctactcctgttttttcaacaaaatccttagctaattttgaatctgtatatattatttcatcagtaccaccttcacttgatgttcctgttgttcctattgttccaagttctccttctacggacacatttaatccttttgctatttctactatttccctagatatagctacattctcttcatatggtaaatgtgagccatcaatcattactgatgtaaatccacatcttattgcccttaatatttgttctttattttccccatgatctaagtgtattaccataggtactttactcttatttgcttcttctatgcaactaactacaaagctatcgcctagaaaacttagctcatttgggtgtattgcaagtattactggtgcatttttttcgttagcaccctgtactactgctttaagtatttgcccacttcctatattaaatgctggtacagcaaattgattttcttgtgccacttttagcatttccttcatattgattaacatattgtacctcccgatattttaaattttaggttgaatttacttcttgttaattttgttgttgtttatatttaaataatatcagggtaatgaagctcagaaaataacaatcgttttccttattgaaaaggaacttttattatacactctaagttccttttcactaaataatttttagaagtctgtatcatagttaattatatttctcatgtacatcttctctttttaagtgttttaatttaatgtgctttagccatcctatatttttataataaacaattaagatactttaactataaatttaaagatactcatgtaatagttaatgctatatgggagtcaaaaaattaaaaagatattagctatttagccaataccttttcttggatttcaatagtatatacgatttataggaatcatactcacgattatttaatgttttacttccataaactttacataaaacaccaaagtgtcacccttcaaattcatctttagctaataaagtgatttggttttctaagcaccaatttataaattagcctttgttatcttatgtaaatctttttctatctaatttaaaaattattcctaatgctatatagcatataccaattactaatacaccataagccatagatactcctatcttaaattcttgcatattagttacaatagaaattgaaataggtctattataaacaccataaagcaaggctgacattgtatattccccaattgtacgaatgaatactaatatagctcctgaaattattcctggcatcatatttggaactattacattataaaaggtttttatccttccagcacctaaactccttgatgattcttctagtcctaaatttattgacttcatagcaacctcattggatgaaaataataatggtagagcataaattgtatatgctataggtacaatataaaaacctcctattaaggattcattaaaagcaaatatacttttttgattaaatgtattaattaggttaactgcaatggcgcttgcaggcatactccaaggtaacattataataaattttgctagtcgattatatgcagtatcctttttaattactaaatatgatactggtacagtaattatcaatcctactgctactgccattaaagacattttgaaactatttaatataggctgtaatacacgtgatttttggaaaatcatctgatagttttccagtgtaaagtctctaggaaatatggttgtcataattgaatgtgtgcttacaaaggataaatacacaatagtaactataggaagcataatcataataatttgtatttcaataataaccttacatacaaatgtaaataagtctttttttctattatgaactttataactttgagattttaaggatggcactactccatattttttgccataatactgtaataaaatcataaataaaatccccattagtaataaagtaattacttgaactgaagctatatccatatggttattagccttagacctaacaatttgagtgcttaaaactttaaaaccaccacctataagatttggagctgagaaagaactaatccctgatgcaaaagttataatagtagaagttataacagcaggtgtaataacaggccatattacatcaaaaaatactcttagctttgatgctcccattccttttgcagcttcaactgttgagtaatccacatattttaaggcaacatatacatttaaataaaaatatacatactgagtataagcaaccacaaataaaattccctttaatccactaaaatcataaggttttttgataaaggggagtaaaatttctatagattttgtaactattccactttctccataaatctgaatacatgcaattaccataattactccaggaatcatcattggacttagtaaaagaatatgtatgattttcttatgtttatcacaaacaaatgtcatatataaggcaagtgatattcccataattccacatacgaacacagaacccaatcccaaaattatagtattgcttactacccttaaattattagtatttgaaaaatattctttaaaaacttcaaaagaatatccacctttaccttggaatgcttgtacaaaagtattgcctattggtatgataatatatccaatcaaaatccaaaataatatactgtataaaacaataaaaataacatttttagatgtaaatttactacggtttatttttttaatcatattagtcaccttgtagcacacctaaatatgccatatcccctacgtttaatttattgctattattcagtctattaagctcagttacttgatattttttcccatcatttgatactgtatattctaaaattgctcctagaaaattcttagattctacttttacttttacaaaaccactttgatttgtattttgcaataatatcatttcttcaggtcttttataaatataaggctttgtctctttttcaatattaaaattaacataatcttcttttccaatacagtttgaagtacctacaaagtttgctacaaaatcattcaatgggcttttgtaaacttctattggcacaccaatttgaagaactttacccttatccattacagcgattctatcagaaatagctaaggcttcttgttgatcatgggtaataaataaagtagtaatacctgtcttttgctgtatctctcttatttcttctctcatcttgattcttaaagctatatctagattagacattggctcatctaataaaagcatagtaggctcagtcgctaatgaccttgctactgccaccctttgttgctgtccaccagataattcatcaatcttttttttcctaaaatctttcattcctgacagctctaaataattatcacatttttcctttataatttttttagacagcttttttattttcaatccataagatacattttcttcaactgtcatatttggaaacagtgcatagttttgaaaaacagttcccatatttctattttctggttctaaattggtaatgtttttatcaccaacataaatacttccagaagaaggttttataaatccaccaattattcttaaaatagtcgtttttccacatccagaaggacctagtaaagtaaaaaactctccttccttaatagatatattaatatcatgtaatactttttcttttccataataatgattaatttcttttaattctatattcttcatatcgtctccataaattatctaatatttataaatctctaaatatacacatgatgaatcatcatagattttaaatctaggaaactctattgccatttcatcatccttttctagttccctaacctttctatatatataatctatacctttaatctctgctattttcatcatttcatttttatcaaaaatcttatatctatcatatccacatgaaaaaccatcactagccatcataattttcattttatattctatatcaataaatccacttacacaattgtcaacggcctctttagaaaattccaaagtccaatatccccccacagtatttttcttaagtctattctctattataatcgcattacctcggcttttctctcctttaaagtaaggtttgtagcatctttggcttctttcataaaatcaaatacttttttatcaagttcacataaagtctcatcttttaaaattttcacagattcattattgttaactaataaagtacaatctcctaaaagtaaatactctatcttatctttataaaactttaatatagaacatgaacaagaaggaatatctattgcttctacttctttatcatctgttaatttgtagtactcttttgttatctcctcaatgccttctttaataattacttttaagctatcttctctttccatattctcatgaagataactattccaccaacttacataccatttggcatcactttctgtagagactaaatttttattatttaaacctgtagctccatcaagtacccatgccccataaggtgataaacctacgatatcttcgttaaaagcgccactacctttattacataataatttataatcactaatttttagttccatttttatctccttgcccatataaattgtacttttactataattaaaagttttgcataataaaaaattcactttatttgagagactatgtctacaaatcactttatatagtcaattacttcatcagttactcaaaaactattttatttaataagtatgtattagtatcattttgttgtatgaattatacaaaattatgagatactatagtttccttatacgtaaaatagcgaggaaaatcctcactatttttgtatataatattaaattatttaattaggctattttatagttttattgttatctattatatctgtttcccacttttcaatccagttagactgattttttccaattacagaccaatctacatccatagctttatattcttttgacatccactttggtgaatctttaagtgcagaatctaatgttggaatacgattaaaatcatttgcaaccatagcttgaaccttagcacttccaacaaaatctacaaatttagctgctgcatttggatgtggtgcattttttagagctgctacacagtctgtgattactacagaaccgctctctgcatctacaacttctaatggcatattatttttttctttattctctattatatcacttaatactgcaacagatattgtagcttcacctttacctattgctgaatacatgacacttccactattgtagtaattctttatattcttatttaaatcctcaagatacttccaagcttcttcttcactcttagtatttgagtagtaattgattaagttactaatagtagaacgcatagatgatgataatgaatctctagtaactattaagtctttgtattcttcttttgttaaatcactccaatcttttggcgctttatcagctgataatagttttgtgttataaaacatcattactggtgtttttatagttccataccaatatccatctgaatctttgtaagacttgtctaattcattattccagcttggttcagtcttttcatataatccttcttcttttaattgcatgtatgtagatgtatctccaccaaacattatatctgcttgcggattatctttttcacttctaacacggtctgctagttcaccttttaagtttataaattcaacattaactcctgtttcctttgtaaattcttcagaaattgctcctagcatatcctctccatgtgtagtatatactactaatgtatcctctaatttatcactttttgatgtgttatcattgctacaagctacaagtgataataacattgctacagttaataaaacaactgctatttttctcttcatattgattcctcccccatattctccatgttcattttaaatgttattattcttgcagtcaatgattcaacaacaatctatataattgtatttttctataacagcttattttattattgtttttttctataattatacctatttttatacatataatttttttattaacattaatccatttttcaatctggatattttatttctttaaaacctattttaaatattagtattattatcatttatatacataaaaaatgacctataaataggtcacctaaaataatacttatatagtatatgagatactttcttaaatcacttattatttttttatctagtccactttcagtaaatagtgtatgtatgtgtatggtttccattttaagtcttaattaaaagtgtgaactactgtaagaccatatctcatcctcacatctaagctttaaagttttatctattatttattaattggctgtatattcactaatttttatcatttacagtagtcttcttatcttaaaataattacaacctaactttactcatacattatattatttataaatatttttaacaaaattaataattaaataactatattttattaacaatcttataaatatttatatcctatctactaatcttcttcaataaattcaaacaaattttctactgtggtcccgaatactttagcaatatccatcgctaactttaaagaaggattatattttccattttctaagtgtacaatagtctcacgtcttaccccaactgatttagcaagttcgttttgtgtcataaggagtttttctctatattctttaatttttgttttcatcgatattgccacttagttacatatcccccttttatcaaagtatatatacaaaattaatttagataacgattgtataaataaaactgcaataagaattataccagtatccaagtttgatatatttatattacttatataaggtgttgcaaagaaaatagctattataactatagaatacatcattattgttattgcaatctgattaacctttgatagtataaatttagatgattcatcaactaaatcattatattttttattataaattgaatagcatccaaagactattaaccagctcagtcctggaagagatgcagtacttggacctttaaaaatatacttagtagctaatacagctataaaaagataagttattacaagtaattccaatatgagttttgattttacaccagtttctgatttagacatataaaatccaccttaaaggttatatatttataacacttcatgttataaatatataacctttccaaataaattgcaagaaaatattgtaaatacttaataatatttttacaaatatagtccataaaagatttcataatagacatctaatggttacaaataatattataaaattacttttttattcactcctatagaatcaacgctctaaaaaattcttataccataaaaatatattctttagtaagcagtacagtactagattagtttattatatctattgtttcaatcatatcatttaccaactattatcctaattaatataagatattgaaatgtataattatacagcctaagttcactccaatacaccctcaaaaatatctctttttttgtggatgaagtacagttggggatttcattactaaaataaaaaatactagccaatattgactagcatttacaagtatttctaagtatttcattatttatttttacaaatcattagacacgaatctcaagattaatacacaggattaattcatttcatatacaatcctaggttttcatcaaaaatatacgtcactttactatcccatgatataatacaacagaaaaaactacaatctatggtggtttcatatattcttagttatattagtaggaaagaaatgtactccatatggaactaattataaattttattattggaactatcatttctatttgtgttggtataaatacaaattatatatatgataaaattctaaactacttatctattgccatagaaaaagtaatttaaaatttgaatttaaaattaaatcttaaatttatttattacaattcattagttcgaaaaaatatttagagtcatgcgtcttataaaggttcaaccaagaacttaatgcttcttctttaaaaacatctaaaacttttaaaacttgtactgtaaattctaatggtgcaattccagaagcagtaattaaattttcatcattaaccgcagattccattttataatatttttctccagaataacttagtatcaccatttttaaaaattctaaatcattacttgtatgatttctaaaatctagtaaacctgttttagctaaccctaaagtagcaccacaaatagctgcaactatagacctttgttccaaagcctctttagatttttctaatattttctcatgacctatagatgtccaagtatttccccctggcaaaattaataagtcattactttcaatattaagctcgtcaattgtaatctcaggtaaaacttttaatccacccattgttataataggatttttatcaactcctactgtaattacttttagtggttttaatccttttttaaaatatcttcctgtatttaattcagcagttagatatccaacttcccaatctgacatagtatcgaatacatacatatatacttttctctttttcatttttttgctccttctataattaattaatatacctaattgtaaaataacttaactgacatactctgtcagttaagttattaaatttgataatgattaattaattcgagtaaatcttcaaccattttatccctaaggcttaatggttcaattatttgtatagattttctataaggtataagtatattcggtacatatgtaaatattatctcttcttgaagtttaaatattgctttatttgaagtcctttcttttaaataatatcctagaagccaatgctgacataagttatccaatgcattcatctttccttctataactaatgatataagattatcctcatcttttgtttcatccataatccctcttataaaaaattcacttgctgaaaattcttttggcctattaaaagtatttgatgtttctatgacactactaattctatctaccctaaaactacgaatctcatttctcatttgacaaaatgctactatgtaccaattattattccaacgtacaattccatatggatttataatcctacattttgatttttcttcatgagctgtacgatagttgatttctacagataattcatttgctatactattttttaactttttaagtacagattctatggatatttttccagttggttttattacttcaaaacctattaaatgttttgttaaagtttcttcttgtttttgatttgaatacatttttaactttgaggttgctttgtctagtgtgtcatctaagaaacttccctcttctttagcaaatatagctgcatgaagtaacgcagtttgttcttctgtatcgaaaaaaagaggtgctttgatgaaattattcaaaagtgtatatccaccattatgacctgtatctgaaattataggtactccactagcagataatgcatcaatgtgtctgtagacagttcttatatttatttctagtttttcagatatttgttttgcggtaacttttttgtctgagtttaacatccataatatggacatcatattatcaattttagccatatagttttaccctttcatatatgttttataaatttaattatataggttattagattaatttttataaaaaaagggctatcgcacgagcacactaaatttgttctgtaaaggctccttattcttatctagttttttaactatttatcttggatacctttatggtacattaatccattttctaagtgtacaatagtctctcgtcttaccccaactgatttagcaagttcattttgtatcataaggagtttttctctatattttttaatttttattttcatcaatattacaacttagttacatatcccccttttatcaaagtatatacaacactaatttagataaagactgtataaataaaactgctaagagaattatacctatatccaaatttgatatattcaaatctcttgtacaataagcttcaaagaaaatagctattataatcataaaagtatactctttaataaacattacaatatggaactagattagtttattatatctattctatcagtaatatcatttactgactattattatcctaatgaacatgtagcaaatcacacactctaaaagaacccaatataccatcagaaaagcctctttttctgtagttatggtatgcttgatggatttcatcactaaaataacaagaggctatcgtatgataaaattaaatttgttctgcgatagctctttctacttgtatacttctattcactctaagttcacatccctctggtcttataattctctttaatttttcttttttcatgaaataacttagatacttgtaagtttttagtcctattttcaagaggagtcttactattattacccttaataaagctgcttttgtactgacaatcacgaaattcttcacatttatacacaattttaccccaagagtcgtaatgagtcacaaagtaattcagtttctacctgcctcactgatagtaatcactttatttgtttacttgttatttatattaaactaaatatatcctcttgaattaattcttctttattacctatataaaatttactcatatacaccaattcatcagttttattttgcttaatctcattaatatccacaaattctttattagaagtagttttttcaactgtcattaaataaatcttattaaacattgctcttatagaagcatttgttacatgagtataggatataatttgaacgttgaattttttagcaagttcaaatatttctttaaggaaatcttgctgcgacgtttctccaaaaggattatccataagtagtaccttacccttatatttactttcatcaactattgcatttctatcatatcttttatattccatcaacaatattgtcacaataaatgagatacaaaatctctgtcctcctgttgtttcgttattaatagagttccactttatagtttcatttctatttatttcatattttataactgatacaggaattctccctatattaagagtcttatttaaaatataaaaggtatttattttttgttcaacatcacctaggtttgcttcttctacaatttcatccattagcatatctactaagctcaaactattttctattttatcagatttaggtagtgatatgttgaataaggcttgtcctttatgtttaccaagtttatttatgattttaaattcatcaatacagtccataacataatcttttatttgccttgatattatagtcttttcttttcttagttgttcgctatgtttttctaatttgcttatttcttctcttataactagtaatactatttctacttgttctttttgtcgagagtaattatctttatttacatttaaagtttctataaagtttttgtatttttccatgtgcttataattaaattcttttatttctaatattgtatttttatagctatttatagatttaattaaattatattcaacattttgcagttttgattgtagttttttactttcaataaaaatatcttcaggttgataggttatagcttttctttctactttatatttctttaagtctcttaattcctgttctagattttgacaagtagttctattaccttctataatttcaccaatatcctttatatctttttttatatctatttttctttcttcaaaattaaagttcactattaagctagtagataaaggttcttttccattaaattttttaagtatctcctccctcttagtgtttaatgaaccttgatttttatctatgtcgcttttaatactatatttaagttttcgtagttcatcaaccttacttttatttaaaactattcttttattaagttcttctattgtgaataatataggtatattttcaaaattatcactactaataagttgtctaaattcttctaactctatagtaatactctctattctttttaagcaaactgagatttcataatttaatgtttcaatctctttttttgtagggtcttctaagtatttcttgtattttatttctaattcttctagtttagcattttcaagtttaataggttcataaatcttaaatttatttatcttgctttctgtatcatctatatgcctatttatcctatctttttctgaatttaaattaaatatattaacatcaatatcttctattgattttttaataacttttttttcttcttcgattttttcaatacttgtttttaacttagttatttcatttttattttctaaaattatagaatatgtatcttgtatatttctaatgtccttcaatttattaaataatatattcttgttatttaatagcttttctttattttcgtaaagttctttaattttattagataaattcttctcattattttcattactcttaattttattgtttatttcaaatataatttttttataattttcaattttcacatctatggataagtcttcagctgtaaaatcaattttattagttagaagtttaaattcttctaatatttcaatttctgctttatattgctccactttatctcgaatactatttatttgttctttgattagattcatatccttttctcttttttcaggatctaaagctttgttatcgaaagaagatagtatatttaatccattactaattacaaggttactagatgtagttataaaagtatcttctatgttatctcttacaaatataggcattgagattttagttttattttttaagtttatttgcttcagtttttgatactctttatttgtaattattatagaatatggtagcaatggatttttagatatgagattatttttgtattctaaatctccatctaaggttaatagatatttcatgccttcaataggttttattccatttctttctagatctgttaatatttcttcttcgaaaattatatctttataattttgtaaatcttctagctctttttctaattgctttttattattttctaagtcctgtacttgaagtttcattttgttaagctcttgttttacctctttatatagtttagtagagttatctaattcattgtctatttcaaatcttgttttaatgattttatatttttctttaaaattatctatatctttctttctagtttttaatacttgcagtttcatataagattcatgattatctaatttaagattatttatagcttcatttatatcatccttaagtttattcgattcttctatttgcatgactttcgattcaagattttcttctattgattttacttttatatttaaataatttatatacctagtataatctattacttcgcctaaaaaattattagaaataaagcctttaatatcagtgttattaagtttaaattcatgtagttgattattaaaatcacgttctttgccttctatatatttaatttctgaatttttacttatcaatacttttgtgagcttacttttgtcatcattaagttgattctttttttcttgtatagctatattgttgtttgtattttctttaagtttttcattatttataatactttcttcctttaaacaataatgaatactgctacctagacgatttataatagccgttatttcttcttgatttacctcttttctttgtttttcactttctttttctatcttatctttttccccttcttctagccccttcttttttcttttgaactttgatatatttaaatattgttcatctaattctagttcttctattttatcatttaattcatttttggctttatcaaattctacctgagtatcttgtatctctttttcttttctaaaatactcatagctatcttcttcatattctactatcttaaattcctcttcttttgatgctttcattttttgatactgttttatttcttcatttaattcattgcgtttattttctatatgtacatatagattagctaattctcctaatacattatttttatcttcttctatgaataggatcctatttattttattttgtaaactttcaactctaatgtttaaatctctatagtttttataatctgataatttttcattcatgtctataatattatttatacactttcttacttgttccttaatttgcaatattggagcgaattcttctgttgttaagcttgtctctattaaaggtaatattttatctcttataagtttttctgaagtattatgttctttaacaaagtctgatagtccaccttctttgttattactattaagttttataataatttctttccattcactttggttaattccatattcttctaatttttctctatgttgttttcttaagtaattattaaagaagtgtactttgttttttccatatttatctcttagcatttttatatagtcttgtgaggccgttaaaggttgtactatccttatacctttgtcattgttttttaataaaggtatattatctatatcaacctccatttctttagattcttctataataaacataaagtatttgtataaatcgtcctttttttctttcccttcttctttagatgatccagcctttttctcaaatcctattcccgttaataataacgttttaccatcatctagcaaccattcagtcattgagtataatggttcttttttattatatattgcagtaaacggtttggctacatccgatagtggacaaatactttgtatgatagtttgaatactcatagttttgcctgctgtattttctgcttctacttgtaagttttctccatacagttccatggttctgttgctaagtattctttcttgtcccataccaaatttaaaatttataattttgtatttattaattactggcattaatactttccccttttcttaaaactagtttttctattaatactttcctttcttcatctaaaaaataattattcataagatcaagaaatcttctagttggttttatcttatcttcatcctcaatgtgtacaattaagccttcattttttaagaaattaattatttttctaataaaccctatttggaaatctgctgatgttgtttctattcctttcttactagattcgtcccactttcttttactttcccaatagttctttaagatagttatattaaactcacatgatttttctatttcttctagattatcacgagctattgaacgttctaaggattcttgtactaaatccagtaagtttaatacttgaatatatgatgctggtgctaccccatttgtaaattcagaaaatattattgtcattatcaaatatcctaaataactatcttttaaatctttccctaataaagattctcttctatagtcaaacccaaaaatatcattgtcattatttggtattaagtataaggtatctgaaattaatattatttttattttagatacttcacaaattgcctctaaagcataccttacattactgttatttatataagctaaaaataattctttagcttctttttcttttaactcactttttttaagtaatctataaaatatttcattggctattttatagtcatttaaagatatattcattgtatttccccttatatttagattatttcaaattttatatttgctatttctagcttaactgcagtcatagtttctaaatttatttcagtatttattttcatttcatcttcaaatattttattacttttaatatggctaacgctatttaatagttcaaaatcttctactaataaacgttctattaatctttcaatttgaaaatctgtatttggtgagaaggcactattttctaacattctgattatctttttgatattgatactttccctttgattagcgaagtaaattattatatctctcatcaatttggagtctttagttatttctaagtaaataactttgtcatatttcagataattttttagaaattcttctaatgtaaattgtcctttttcaagtccatatttaattaagtatttaaaaaaatcaaaatagtaattttcacaataatttatacgttcctccttctctttattttcaataatttctaactcgtctttattaactatttcattttcaatttctctagtatttaatagtttctgttcttgatatgccactccaatattaaatcgatttggcaactctactttaaataaagatatatataattctcttattatcaataaaaaatcactgtctttttcaagtctatctaagatttcttccttgaaattgaatcttttaattactggagttgttaatagttttttaagtatttctttaaattcttctctaaaatcttgaactctagataacaaatttgtggctgtagactttgctaaaactattccatctattaattctttcatttgtaatagttgagttcttatattttttatcttttctttgtctatatcctcatccttttccaagtagtcctctttatctttgattaatagttttacttctttttttaattcttcatatttgtccatttcttctaaaagtgtttctacagttgtatctattactgttgaatatttttcttcttttatatatagtatatttacttttattatttttatataattatcaattttctgttgatgaatctctaaggtatttattatatcgtaaatatcttcctttgcgccttgataatcacccttttctatccttaactttgcaatcatttgtgatatttgaatttggaatagttcatcatattcttttgttgataacaacaatctataaccctctgttgttaaggagtaggatagtctttcctgattatttatttttacatttttatcttctataattttaatactttcatctatatgtttttcttgttctaaagaatagtaggtaaatagatatactttaccactattggttaatccattaattatatagtttgctaaatcctttaagtcatcctctgaaagcattattttataatccatacgatttatttcttcaataaaatccttaatatcatctcttaaacagttctttcttctaagagatctatcaaatatataacacaaaacttgaattaataaattgtaaaattgaatgttgtcaaattctttaaatttatttctattgttagcaagagttgcaataagataataagatcctatacagtttactctcttattgtagccttctaaaatattaatcatttccattagttatattcctccaagtcgaatctatttagagcttcttgaggtatgtattttccttgtactaaaatatttttaatactttcttttaagtttaggttattaatattttctaatccacattcaaaattatctttttgatttttggggatattcctcaaggtattttcctttgttttatctatcatatgctcataagcaacttcaaataatcttatattattaatttcattggtatcttttagggaagtgtatattgataatccagttttatctatatctccccaatataaaaattcattttctttatttgtaagatattcaattgttatatcttcctttaatcctttaatactgttgattattttttttccttctccgtatataacagtatctattttatttttaagtatttcttttccttctaatagcatttttgttattgttatgtaagtgtctttattttctataattaatattttttgtggagatatacgatttattgataaatatatgaatggctctggtgtcttatatacgtttaaatcctttattagatctatttttaagttttttagtacttcttttcctactttactacttatgaatttctcatccttaaatatttcataagatctttcgttaatcgatattttctttgatagattatcagattttttaataagataactatttaaatccattattgcaactctattatttttatagtgtactaagttttttctataataatctatacttaatttatcacatattttgtaatttatttcttctaatatttttttatcttcttctgtttcttgttttattattctatactttgtatataattgctcatgctgaggtgttagatctgaggtttttattggttttattttattatcatttattagtttttttattatgtgtactagttctttatgctcattgattttgtatattttttgtatttccttaaggtatatataagtcttttttatttttgtaatcatacatgtttaaatcccttctttacttataactatattatacaccattttacaatttcagattatattgactgtacataaaatagtacatattagataatgacaataaaaaaactagaacttaaagaaaatctatcagcactagtttaagtattatttatatattttgaatctctgtttttatttattagtataacaaaaacttaaatccttaattgtagatgtcaacccaaaattgttccaaattttaattgaaaataagaccactcttcatttatatataaatagtaaattcaaaataaaatttcacatgaatttactattctgcgctataatgcaacagaagaaactacaatctatgaatgggtttcatatagtcctagttcctacagtaagtaggaactaggtgtattctatagaactgatgatgaatgaattatactcatcttaggagacagttaaaatatgtaagactatctaaaactaagatatcttcagagcaaaaaaatcgaagcaattgaatcatatttaaaaggtgagaatacagtaataaaaataatggaagaattaaatattggataaacgtacattcagagagtggatgcgaaattatgaagcttttggaaatgatggtttaataaaacaaagttgtaaattatgctattgtgaagaatttaaattgaatgctataaaatcttatctaaatggtgaaggatcttatgacacaatctcaaaaaaatataaaatgagatcagtttattcactaaaagcttggggtaaagagtataatcctcataagtagataaaagaaacctcgaagggagaaatctttatggagactagaaaaacagcattagatgaaagagttgaaattgttaaagattgtagagagtgtacagactaatgagagccgtaggcttaagttctgtttgcagaaaaaagaaatttagttatgttaaatgtacgccagaagtgatcgcggaaaatgtattaagtagaaaatttagtgcagataaaacctctcaaaaatggttaacaggtgtaactgaatttaaattaaccaatgggatgaaggcctatttaagcgcaattctagatttagacgatagaagtatagtttcatatgttattggaaagtcaaataacaataacttggtgttagaaacttttgataaagcaatagagctatatccaaatgcaaaacctatttttcataatgataaaagtttccagtatactagtaaggtatttaaatcaaaacttttaacacaaggcatgatacaaagtatgtaagagttgctcgttgtattgataatgctcctatggaaggattttggagaattttaaaagtggaaatgtactatttaagaaaacttgatacatacgaacaattagtcaaaacaatagaggattatatatattactataataattttagatatcaaaagagattaaattctatgtctccacttgaatttaggaaatatttaaatacagagatagcataatttattttaagtagctctaaaaaaatttaaatacctagggttttatttgacatgctcttttttagatatctgatataatttctttggctaattgttttcttaaagcgttcataaaaaatctcctttacgacatttgattatatttaaataattgccataaagaagatttttattaaccttaaaagcacaaattattttacattaccatgatttattttataacttgttaatatatttctaatagccttgtctgttcatttaaataaccatcattattcattactaaagtatttatttctttaattttatctctttttaaatttaatgattcaaatttattatcttgtattttattctttataaataagtatagaatcatatttttcatattagttgaagacgccttatattctatatctgctatgggtgaacaagatattatttttttaatatcttgtattaaataattattttccaagtctatatcataataataacaaatagaagccaacacaatagatactcctatcaagtatttactttgtctttgcttatcatcagatattaaacttgttgagaatggatattctatcttctcagatattttcagtatcatcctattaaactcatcaaacttatcttttaataactctaatttttcactttcattatttttatactgaattgacttatactctaaaaatttcttagaggctgtaactccatctctgatattttcttgtagcccattttctaaaatactaaatattatacatatttcttgatgatttttttgtttatcattacgagatttagttatgttatatattctaagtaaatctgatttgtaattagcatatttatattctgatttatctatttcatccttatatttatcttttattagagtatttataaatttacttatatacttactagtttctgaaaaatatgttgccatctcgatttcttgcatctctaatggttttgtatttctgttatatcttttaaataattctatttctatttctggattatcaaaaccatcaaattctagaattgataaatgacttcctaatattttaattttatcttttttctctaattctgaaaaccttttattatcatatagtgggtcattgcctaatatatctaaatttttaagtggatatttattcttaacatacctatatatagcattcaaacgatgctgcccatccattacatgtcttatttgcatatcatttacacctatttttacaagaaatatttcaggtattggtattccaattaaaagagattcaattatagaactttcttccttgtttgatgatttatatgtacgttgataatcaggactcataactattccttgtaaaatttccatttcatctatttcatctattgataatttcaagtacttttctcctttatcaataaaattcacaatatcttggactgatacaagaggtctgtttgatttaatattttttatagaatttttaaattgttctctcattataaatttccccctactatctcatcataatagaattttatagatttaactacattatctttatctggataaatattttcaaatgtaatacctaaattaaataattcttttaatatttcttttttagcatctttattaataactactactttacaatacttttttaatttttccttaaattcgcctttatcttctgatgatacttttaggaaacatcctttttgaaaatgtattctttcatttgaattccctacctttataaaaaatgatcttgatgaaaatttactacaattatctattgcagatgtatctgaataatttactaacttctcagatctttttatagtgtcagtattataagaaatagagtctataaagtacacaattgaatgctgttttgtatatttatagtcttctattgcaaataataatgatattaaatgagcttctgtgaaatctaaatattctgttggtagtccaaaatgttgcccttcagctcttaattcttcactcgatctattttttatttctttatcataataaattattttttgtttgaatgcttcctcgtattcatctgaatgtataccatagtcttttttatattttctatgtaatgatggtaataattcatacatacaatctttttgccctctagatacatagtcgcctgcgttatctagttcagataaaaatgaaacatactgactcaaatttgatataaatataacttctgattcaggtatacctatatatttagacatagtattttgtatattatactctttccacttttcattttcttcatatattttatttacagctttagatatatgttctatatttatatttaaatttcgttctaatttaatattagttatatcaactaagtcctctattttaacattttttaatatatctatatctatagaatttatttcacttttatcattagtatctataaaatatgattgctttaaatagcataagtttttcatatatagttcaaattcagttgaatcttcttcaaatttatttacctccataagcatacttttaatttgctcatctcctaattttgaaatatattcaatatcatctataaatttatccattacctcatataatacatcatcctgctcacttaaatcattactaattagtaatttattatcaaaaattttacatattactgactgcattttctcccccattaaaattatttttactctaacttatctatattataacaaattttaccatattcggttagatatatcgttttatttatgacaacttagatattttataaaatttttaagtatcatctattaatatatattataaatttaaatcaataaaaaatgggctaccacactagaaaattgatataccctctttatgggaagaaaaattaaagtcttagatgagataaggtaatcttaactacacattgtgttacatataaatatttctaacacacttaataattaagtaactatatttcattaaccatcttataactatttataatctatccactatccttcttcaataaattcagacaaattttctactgtagtattgaatactttagcaatatctatcactaactttaaagaaggattatattttccaagtgtacaatagtctcacaccttaccctaactgatttagcaagttcattttgtgtcataaggagtttttttctatattctttaatttttgttttcaccaatattaccacttagttacatatctcccttttatcaaaatatacatacaaaattaatttagataaaaactgtataaataaaactgaaatgagaattatacccatatccaagtttgatatatttatattcattgtatgaggggttgcaaagaaaatagatattataactatagaatatatcattatttttattgcaatctgattaatctttgagggtataaattctgatgattcatcaactaaatcattatactttttattataaattgcatagcatcaaaaaactattaaccaactcaattctggaagagatgcagtacttggatctttaaaaatatattctttaataaacattgcaatacaggactagattagtttattatatctattctctcaatcatatcatttactaactattatcctaatgaacatgtaatattgaaatgtataattatacaacctaaatgtatatcaatatggggctgttgcatgagcaaattaaatttgttctgtgagagctcttttctaattatcttaataggtatattttcaattgttttatataaagtttctgttctaagtaaaattatgcatgacaaataaagatataaaaataccattttttcagataatatttgattataaataataattttagaatatttttttaaatgataaagatatattccacgtttattttttactattttattgtgtagtctagaaacgttataagctatcgccacaataatatatccttataaaacattttctttaccttggcttaaaaatcttgtaagtttcatattttattttacttgagcgaaagctccttctgcttgtatacttctattcactctaagttcatccccctcgaggctcataattctctttaagttttcttttcttttttcatgaaacgacttagatacttgtaagtttttagtcctatttttaagaggaaccttactattacttctcttaatacaattgcttttatattgacaattactacactcttcacaaatgtaacatgttatttcacttttatatcctgtttttgatttcctatttattattttattagcaaatagttttttctcatttgtacaaatataataattattttcttcttcataatccatattgtcaatacatccaatataagttttatattttctagttttaataatttcataatttgcaggttttatgaaagataactgattattatgctctaaaaatgcatagttttattcactttcatatccaccatcagctattactttaggatatttaaacttagtatattcctctatagattttaaaaatggtattaatgttgtagtatcagcagtttgatttcctgaatttagccaaactatatattcttaatctacaccaaattgtatattatatgctggtttcagttgcccatttttcatatgatcttctttcattctcataaaagtttcatcgttatctgttttagaacaactatttcgttcacccattatatgaaggtttttagtagattttctatttccttttccatgaataaatgctacatttgcttcttttgatattttttttagtttctttaaatgatagattttaattttatcttcataaactattttaatgccaacatcaatctcacatttcaatatgaagtcagatatattattcaccattttagccatatttttatttacagcttttttccaaacaaaagtatatctattagcagatgactctatttttgtaccatcaataaatattgtgtcttttgaaatttcattattatctccaagaaagtttgtaaactgtgcaatcaagcttttgcctattagttaaaaatgtatactgcgaaattttgcaattgttgaatggtctggagtggaggtttcgcctagaaggtacataaaattaatatctcttttgcatgttctttctatttctctcgaagaataaatacagttcatatctgtatatattataactttcaaaaattgtctatggattactctatttcatctaattcgagaataagtcttatataatttttctaaattcatctcctcaataatttaacttaataaccttacagaatcatcttttggaatcatgtaatcaatatttagtggtagcttaaattgataattatcaccataagtagtataatcaatttgtgtagtattttgttttagcatacagttattatacaagaatcccaggttcttttgaacttgggatttatttttttatacaaaaaagagcgtagcactattttctagtgcgacagcctttttatttatataaccttctagttgtgtgctaattgtgtgcttttaagcaaaataaaaggaattacttagtccaaacataagtaattccttttattctattattttcattttcaaaattggtggagacgaggggagtctacaagtggttatttgattgttttgttggttttcgtaagtgtaggtatatagctatttagttatgatgttatactaatttttttggatattttttattatttatttttgtggttggggtattattggggtataattttctactttctaaaactcttgctaattcaataatataaatcaaactctcagttaagtttcttaatgaataagtaaatttacaactaatttagtgtaatctaaacttgtagtgcctagtcacaactctcaccccttcaataatttataactaacttagtgtaatttaaacctctctactaaaattacttccacatatagctacagaatttataactaacttagtgtaatttaaactgtacctgggtcttttatcttacttgtaagtgtacttctatttataactaacttagtgtaatttaaacattgcagataggtctgtgccatcattcgtgctgttacatttataactaacttagtgtaatttaaactgggatggattttgaagcttctatgtcaaatgtacaatttataactaacttagtgtaatttaaacgaaacctctctttaaaattattcatagaatttataaaatttataactaatttagtgtaatttaaacattgttgctagaaaacattaaaatacattacacataatttataactaacttagtgtaatttaaacggctggacttgtaatagttgtaactaaaattagtgaaatttataactaacttagtgtaatttaaacgggtagaatgaatcaaatagcaaaagtactttccggaatatttataactaacttagtgtaatttaaaccccaaataaaactatagtaattacaacacttgtagggttattaaaatagttaatttgcagtgaggcaccagtagtgtttttagctaaaaacaaaaattcagttataaaccttgccatcactaactcacagccatttacacatatttttcgctcactgcaaaattattctattgtaacatataaaatttgtagtcgatataaattataacaaattctcaataaaatattttaattagttatactataattctcttaacaatcaaatattagacctagtttatcattataactataacttgtaacaactatatctccacattcataaaacatctttttattataattgtatctttttacagatacatttacaaataatgaactcgcttctaaatacatttttttatcaatatacaacttgtactcttctaaaagacattcaggcacaacactaatagtatcattatttaacatatcattattagcagatttattccatacccctaacctcatatttttcattataatctctaaagcaactttatgtttattatatttatccatatctatatctaaatagacattatctaaataagatggaactttactctcatcaactatagaattatcattatgtattatatctgatattactatatcagtcctatttattatatcttcatcatatatattaagctttctatcataatcatatatataaatattgctcaactcagcattatctccccttctatttactctaccaaacctttgtaacaatgaatctaaaggagctaactctgtataaagaacatcataacttatatctaaacttacctctatactttgagtacctatcaataagaagctttcttctatccctttttctgcctgctctctatctctagtattaaatcgaccatgtattaatttaggattatatttttgaagccttccatataactcttgagataaatctactgaattaacacatattaatactctttttccttgcattaaatcattttctattttatgtatgctatcaagtattccttcacttaatctattcaatctatgtctaaatattaaatctttactatctggttcaataattgtacttatttgcaatctttcctgtattaacttttttaagcaagttggtatacttgcactcattatacatatttttacatttaagttttcttttaaatattttaaaaattccaatgtataacacaatactcttgtatcaaaacaatgtatttcatcaactataaatatactatcttttaattgtgatagtagcatttcaaatctcttacaagaaaatactgactttactaattgaaatatagtacatacattaatttgttttacactctttttgtatatctggtaaagttgttttatatcttcttcatcactaattttattcaaaaaatatggagctttactgtgtaacatacttacgcttatatttctattatataaattttcatataaagaatttatgcttgctgtataaggaagtatataatacactctcttacttttatattcattttgaactaggttactccaatacaatgatgttgctgtttttccaagacctgtcatagccattatcattatatcttcatttttatccatatttaaaactttttcttgtattgaattataacttacaccctttggtatactaaaatctttaatagaattaaatcctttatctatacttttaattcccgcagaagctatatggtcacaatattgcaagtaaccttttaataatatattttcaagttttctagtatcatcatttcttgctcttgatatttcctttataaatggtcttatatcttctacttcaatatctaatagttcctttaattcctttaattcaatttcataaatagaatttgttatttgaccctctagaaactttatatctttatggtgggttaatatagctaacttctgacctctatttaaatacttaatacttgctgataataactcatgtctaactcttcttgtgctactttcaatattatcttgaaagctttttactactttccctacatcatgacatacaattgcctcatataaatcatttttcatatcattagatatattatatatgctaactaattgattcattatgtaattcatatcttcattatgcttatctatacttgtcccatctgatttagctttatattcatataaattattcatgatatatcctttataaagtctcctttaaatattttaagtaactttcaaaagcttgatgtacatttgatattttcataaaatcatactcttcaaactcttcttctaaatacttctttatttgttccttttcattattaacttctatctcattaaatgtatcatcataaaatttatttattccaatccatatatcgctttttctaaattcttcattttgttctatagattcttttaacatctctacatctaagccattttctttgataataccctgaaatacattatttccccatgaatactctcccaatataacaaatttgggttttgtatcagttagatgatttgtcttattaccttctacacttaagtattctagtgattttaggagagcttctattcttttaaacttttcttctttatctaacttttcaactccaattgatttagcttctaaagttgtataatctctatgctcacttgctatatcagatatatcatattctcctatctttcctatattaagatttgctatatttgtatgtacccctgaatatacctcaacttgatatggcatactatctcctgtagttccacaaacattccactcccattcaacttttctatttgatacatttattaaagagttcatttgccatcttgactttctttttttagttatatttacttcatatttctttttattttttttatatatttctttttcttcatctgataattctttgtatacatcttcttctatagataatttttccgccatcataaacccaaatatatcatctgtcgcatatttaaatgggtttggaaccaattttacttgtttcccatctttagttttaacattttgttcataaccacaaacttgttccataaatagcttttgattgtatttttgacattgacttgagattctacttctgctccctatttttttagtataagtagaattcttatatgaattatttttcttttctacttcactactacttccatttaatcgcccacataaaacttctattgcatagcctatatttaacattctatttgaatttttattttccattttaaccctccataatattattaaattaaacttactaatattaaatttttaatctgtctaaagcttcttatatcatccaactcaatataatcctctgcttcaaatagtttttctccagttttttcataatacatttcatttaagttaactaaccagtcctcatatgcataaaattttcctaacattttaagctccttatatattttgtctatatctaagtcactagtttttaatttatccgttaatttttttattatatctattttgacttttttcaatacatttacctccctgtttaaaaaaataacaagttcatcaaaattcttttgttctttctcatccattttttcttccttttttaccctatatacttctctgagataattgctttctaaagtaccattcaagatatacctatccaaatgtaacttttcaaagtttgatagtagtgctttttcctgtaattttattaataaattcacatatttattttttattctatttacctgaatatcctgagattgaccagagttattaaacatatattgctctatatcaccattaaataagttatatttacacactagactttctaataattttacaattgaatacttttctttttctttctttgctcctaactctacatcagttaaattttctttttgaatatggaaagtataatcttccataaattcgcttgatgtagaattgtataaaaaagcatacctacttactctacaattcagaattgaatacatagtcaatactaaacaatatggacatacattcaaaccttgcaaattattggagaaattataaaatgtatttgcaaccaaattaggcatataacttctccctatattgtattctttatcttcaattttgactttggccttatattgaccacataaactacaatattcatctccttgatttttaacaaaaccttttaacttctcatttaaagtaacttttccttttggttgagttagcgtagaattgctaaagcacatactttttaaattagagtatttttcgcaacttacaaattcttcaattttatcactcattaaatctatactattctctatatcttgataagttatatcattaatatctttgttcagataataagccaacacatatagaccattatcaacaaatacattgtaacttctatccatattaagccctcctagaagttatataagttagtaaccccattcctatactatttttttcacctaatccacaataataaattacttcttgcatatctttattagcttgtacaaatatttcaaaatctgtatatccaattataaatccttttccttttatattagttatatatttcttttttactgctaatacatcctcaatatcaaagtatagttcaccagtatattctttattatgtataagcttatacttatttcctaaattatcatgtaatgctttataaaactcttcttgcattggatttaagtatacttgtttcctactttttaaatcatataaacttgctacaataggtgaccttactttataaagtgttatattattaaaatttttctttgaatcttcttctatatctgaaactttaaactctatattattcaatttaaatactttacatttaataaaaccttttataatattattcaatatatcatcatatccacttaaaattaatttgatttttgtttggggatttaaatgtattccctcttttaaatacttagcattttcaaacataattgtgtaattaaataatttaaatactttcttatccaccttatagccttcattgtgaagacttagtgcttttcttttatcattaatttctatagcttcatatatccttttcattagctcatactggtaattgtaatctaatacaacttcattatccactgtgagtatcaaatgtcttcttactaaatgcatttaattactcccccttttttccatttccataaaaaaatattctgttgctcatcttcatcataatatttaccatattcaaactcatcattttctcttaccattgaagaatatatatcataataaccttttttttcattatactctgtcaatgtatttattctttttatcattccatctccaatattaatatctgtatattgattgtatccaatagcttttttatctattagatttacttcaatttcacttaaagataataccttcgctaaacaattagtcttacctaaacatagcggctcattaaattctatatttttatctatgttagtatatatgataagtttaggattaattaggtattcaatgggacatacatcagtttgaaatctatcgctatctgtcaatgtttttacatttggattgatttctttatatatagtctgtaaatctttaaatgtaccatcatgatatataacatatcctaatataaaatcatctatttcttcaccatatatattttttaaaattccgacaactgttgatattggtggaatttcatatgttctttgtatcttgctatgcataggaattttaaagtgagccatatctccaattatttcgattttatttaatatcattttatctcctcaaatatttagttaaaatactccattttatttataaaattagacattcatttataaaaacctttaatttttaccattattttcctaaaagtaacaaatatataacttaattagattattttagtgaagtttctaaaaactttacacttaccttaaatcaaggttctccttcaaactttcaatatagtacttgtaattttctaaaatatttctatgtatgttcatttatttaacaataaaaatacatttctatggattcatcatacatgttagtcttaattaattttcatcaataacttaagatatacctaatcggttagactaatatacctcaaatacttaatttataaaagtagctgttatactttagcaactaccttttcctaataaattttttgattttttatattagtatttgttgttaactagtttagaatatatactttatacatctctgccacacataagcattatttactatcttttataatttgcttcaaatcatcaatactcaaaacattatctttcttcctgtgaatcattctatgacaatttgaacatattggcaccaaatctgttttgggatttatattgctttcttctccaacagaacttaatggtttaatatgatgaatttctatgtatcccttacctctatctccatacgttttttcgaagtcaaacccacatacaatacactttgtgccatgatattttattgcttctattctatttctggggttacgctcatactgtttcccataaacatatttaactttcccttcttttctaatttcagtttctaattctatattaatagtattaatgttcaaaggattatcttgacttatctcctctaatacatcgtcttctatttcagcagtaaaaatgaattctatgttaaaattattactatcaagttttatgaatcttattttaggtaaatttgtttttccttctattttattttctaagaatttctcataatactcagaaaatatacttcttagtaaatctctaaacttagatttccaaattattctacttcttggattctctaatttatccatctctataactgcactataataattatcattatatttaaaattcacatttttcttttcattctttcctaaattatttatctcaaaaaaatatcttatttctattggaactcctgtcccattatgttttaatgtagatttatcaattgtttttaaagctattttctcatctaataactcccaagagtcaactattataggatactcatttatatttctaatttctaaaagtatattaataatctgcttgaaatgtatctcatcttccttaagaacttcaattgctttatctattgtgtatcctgtaaaaatacctttatgatttttatttattcctaaatgatgcactatacccattgattgataacctttactttgttttgatgataaatctagtatctcatcatctatctttctattactcatattatttttaaataaataattataaactactttgtttatttgctctgatgagtatttattaaactctctttttctatcattaggctctaacttaggtattatcatattctcctcctcaattgattattttagattttaataaaattattgtatcatatatttattattaaaatatattgtgctatttatcaaaatacgtaaatcctacaatgtcattgattgcataaaaataaaagagggcatacttatcccctctttattaaatatatttattttaaacaatataattaatatatacttcacttaaaatattctagtacaacttattaataatctcgatttactatttaattattctattgagatacacaaattaattacttcaacaactctattataaattttgctcctgttttaaatcctaatttataactaagttctctttcaaattctattaatgaattaaacaaatcatttaattcaaccaacagatatttcttatcatcttccaaatttatttccaataactcattaatttttttaacctctttccaacattcaatataatactcatctttttctaaaatacttctatacatatgttcatttatccaataatcaaaatatatttctataatttcatcatacattttagtacctccttgactttcatcaggtacttaatatatacttaagttgctaggttagtgtacattaagtacctaatttataaaggtagttgttatatttatatggcaactacctttttctaataagcatttaaatctaaactcaatatattttaaatctctattacatctaattaagttttatatatttaccattcaatacttcttgaaacataatttatctattacttaataaatcatgcttcttttttatatctcttgtatcttcttacattcttcaaaagaaaacaaatttcctatataccaatatggtctaaatcctgactcaccatctctatttttggcaacaataatctcacttaaattagcaccaaaacctttttctcttcgtctcaactctcttatatcctcaattcccattgtcttgcaataattaagagcctctttttctgtaggtctatgaatatatataactgaattagaatccatatatatctgctttgagcttctcattactctatcccctttaggtctttcatccttcaattcatcatttaattgagcaagctgaataactggtatattaaaatctaaagtaatcttttttatttgccttgataagtcagcaaatttagcttctcctacttctttaccttcataatccaaaatttgcaaataatcaattatgactaagctaggcttagtactctttatttctctctttatccctgatactgtatttacagagtcatttatataaaggttattttcttgatttattatgcttaaagcttgtatatatttgactatttcatcatcatttagatttctatttttcatttttacaactgatattccagttagtgaggctatatttctaaacagaatctgtatatcactcatttctccacttataaaaagtactttctttccttgaaatattacatttctaagtatttgtaaagctaatgctgttttcccccttccacttttggctgctattgtagttagttcacctccatataaacctcctatagtatcatctaagaactttattccagtcttaataccttcattcatttcatcatttatatattcaaaggctctctctgatatggctgttatacttgaatccttttttattaatttctgattggctttatttatatcattttctaactgatatataagagtattatcatctatttctccaagattgaacttattgaatttatcaattatatttctatttttatatttttcaataactatactgacataactcgtgaaatttgatactgttgggactattgttgacaaactggtaatatagcttatacctccaatattattcaaatgaccttttctctttaattcttctgtaagagttattatatctattacttcatttctcttatttatttcttttatagcattaaatatgtatttatgttcctcatgataaaacatgtcttcatttaacatttgctctaactcttctactattgttgagtctaataaaatgcttcctaatattgattgctctgcttctgtatttttaattaagttgtttgaattatttataatataacctccttaccactttaattgtgaatcatctggattatatattcctgtctctttatttatgacaatttccttgctatgataattgccctctagtatcttggtaaaattacttgaattcattatccaatcaaaatttgctttccatcctgtattattatttccattcagaaaacttgttttactaactatatttataacctctaatacagcttctttatcatattctcttattattgaatttattctcctctttcttgtgtctgttagtttcttgacctttgaaagttcaatacaagttgagttaaatttgcttataatttcactatatataatattattttcattctttatattcttgattgttgttgattgattgttaatcgtctgttgattaggttgttgattttctatgttctcttggtaaagctcccagttttcaatagttatgactatatatttgtttgttgtttcgtatgttagaaaaccagcatttttaaaaaccaacaaacaacttctaaccatttgataactaactcctttaccacatctttcagctattttgctataagaagaaataaattgtccagactttatttttatccttttattatctataaaaacatgattttctttatgactagccataagtaatagagttattaatattacttttctttctggtttaatatctttccaaattgatttatccaacaactccctgtaaagctttatccaccctttattgctcaattgcaaacacctactttaagactataacttgataccatttgcattttcaataaaccaatcatccaatttgttttttattatgtatactcgattatttatccatatacaagggaaacctttatttttagagtgacataactgcctaaattttgattctcctataggataaagcttagatgcttctttacatgttataagttcagctttatttcttttcgcattttcaataattttatatccttgctttttttcttgtgcttcttcttcattctttacaataatgtttaaagtagcttgtaatgtctttaaaacttctaaattattattctctttcatattttactcctccttactaaaaaataattcttctactgttgtatctaaagctctagatagtttaatcatcaaatcattgcttggattattagccttacctgtttccaagtttgacaaataatatcttgatataccaactctatctgccagttcttgttgctttaaaccttttttaatcctaaatatttttaaattgattcccatactttttcctccttttttctagtttacattcgtaaactttacattttaattataatgtcgacatatgtgtgctgtcaataagaatatattatttttctgttctcatttgtgtacttttgggatatactttatacgaggtgataatattgcaaattggaaaaaacttaaaaaagataagaaaacaaaaagaactaacacagattcaacttgctgaaattagtggcatctcaagaaatgctctaataaattatgaaaatgataaaagaatacctagtatagataccttatcaaaactcgctaaagctttaaaaattgaaaagactatcttttattttgatattgaaaatgaagtaatgactaatgaagatgttttatattttttacagtctttattcccagaagaatactattcttttgatgaatttttaaatgctatttcaaatcttatggaagatgatgatattaggattacctcaagtttattgctaggtgcttggtctgataaagaccaatattataaacttggtgaaaaattagaactaaatgaaaatcaagtttataattggatactttcagattgtgtatctaatactgaattagatttttcattacatcctgatgatataaaagaaattattaaaaatgatgttcttataaaacaatcaattgatgaattattagatattggtctatcagaagaaaatatagaagcaatctatgattactttagtgaggcaacagataatgggagtaacattcgactaaaaaagttaatatctcaaaaagaaaatatgactattaaaaataatgattactttaaattattacaagaaaataatgaattaaaggaaaaaaataaaaagcttgaaaatacacttaaagaaataaaaaaactactaactaaaatataaaataatatcaatactatctaaagcaatgataaaaaactacaaatggagttacaattattaataaagcatatatgctaaaatacacatataaataccctactaatttattttatggagataaaaaatatactctaacatacattaaaagaattatgagtaagttagtatatgatatagataatctagaaaataactcctttatatgtgtaaaaatacaatcattgtttgatgatatatttaaggtggaattatgataaataatacaatcggagaaaagattaaacaatataggaaatcgataaatatgtcaaggaatgagctagccaacaagattggttgttcagttcatgctatagctaaatatgagcaaaatcaaagaatacctagtctagatatgataagaaaaatatctactgctttatcaattgccataaataaactcattgttgaagaaaatgatttagatactttaacaaataataatattaatttaaaagtatttgataaagagttggatttagtagttcacatattagaaaattatggttatgatataaaaacagactataaaaaaaagtttgaaattacagataatgcagatacaataaaaccaattagcttaagcttctctgacttcaaagacttctccaaaaatctaaattgggtgataaatggtcttgttgaaaattttatacaagaaaactctaatggtcttattgaagatgaggatgaagaatattagtattgcacattttcaaaatatgggtttacctattaacttttatacattcatagttaataaataaaaattagatatgaaaggagctaaaatcatgaataaatcatatataccaaaatacacacataaattccctacgaatctacctcatggagataaaaagtatactttaacatacattagaagaatgataagtgaatttgtatatgatatgggtaacctagaaaataaccccttcacattcccagaagtacaaacattacttgatggtataacagtaggtggacataaattaagtgaccaaaatcaaatactaaatataaaatcatcatgggattatataataaaattaagtaacaaagaaaacttatctttaaataaagatacaatttgctctatacataaaatagttgcaaaagatgaagctctaattgttggagattttagaaacggtaacataggtatagctggtactactcaatatgagtgcatagaagccactctattaaataatttatttataagtgacataagtatcataaataaaataactaaccccttagaaaaggctataataataaatttatggttgtcctattgtcaattcttctatgatggtaacaaaagaactgctcgacttacctcaaacctaatacttataagtaatgatataggagttctatcaataccagccaaacataaacaagaatacaacacattaatgctaaacttctatgaaacactagaagctgatgaagttataaaattcttattagagaaatgtattacattcttcgatggatataactataaatcatataaggagttgtttaaaaatggcaactaaaagagctaatggagaaggctctatcggaaaatataaagatggttggcgttctcgtataatgattggttataatgaagatggaaaaccaataagaaaagaattttatggtaaaactcaaaaggaagttaaagataaacttgatgcttataaaaaacaatattatttaagttctgatatttcagatgataaaataactttagagcattggttttacaattggttgtttgaatatagaataaaagatttaaaaccaaagtcatttgaaagatatgaaagcatctatcgtaattatattaaagatactgatttaggcaatgttaagttaaaggacttaagagtatctcacatgcaaaaatattacaatagattgcttgattccaataaaagtatacctactataaggcaaataaacactaaactgaaaacctgcttatcagaagctgaaaaacaaggtcttatacaacgtaattattgtactatggtaaatataccagttgagaaaaaggaaaataggcttgaaatattgactcttgaacaacaaaagaattttataaaagctatagaggggcataaattagaagtattatttttggttgctcttggtactggacttagattaggagaattattaggacttaaatggtttgatattgattttaaaaattctaatttaacagttaaaagaacccttcaaagaacatattttatagataaaaatggaaatagagagcttaaagtattagagcaagaaccaaagacatcaaattcttacaggactgtacctattccaaaagatgttttaaataaattgaaagagcataaagtaaatcaaaatgtggatatattaaaggctggagaattatatagaaatgataattatgtattttgcaatgaattaggtgtccctatagatgataaaagacctttaaggaatttaaaatctatattaagcagcttagatatagaacctataaagtttcatggtcttagaaaaacttatgcaactagactttttgagaatgatgttcctcctaaaactgtacaagttttaatgggtcattatgatatatcaataactttaaatatatatactcaagttatggaagataagaaggttgaagctgtagaaaagttggataaaatattttcattgtaaaaatcaaatacataaaaatactatgatttcatatagttaattacaaaacccaaataaggatacaaattaattttatattatcttgtatccttaattcgtatctagttttaactatttatcttggatagcctttatgatacattaatccattttctagcattaattcttgagccaagtatatatgacccttacagtgcatatctgatacaccctcacttataagtttatatgtttcagaagtatataaataatccatactttcttccaaactcttgcctgtctgattagaaaattctaatataatttttttatatagtatctgtaataatgttttatttgcttccataagcactatacctcctcttcacatctaaactttaaatatttatctattacattttgattagttatacatatttgttcatttggcttatagtattttaatctttttaaagcttcatctttttcaataagattatcttgatacagttctattgtattgtaaatcttatcatcagcaattccacctattataacatcatatttcatatatacatcactcatatttctacattctaatataaagtcaagccattctaaattataactattgaagatttttaccttgcagttttcttttaatttatcaatatctagagaatagctatttaaatatgcttttttaccccttttcttaaaacgttctatccagttaattgcctgtgtttttatactggttacatagaatccttttccaaaatctaaagaatctcttaagaagataatattaggcgtttttgccacacagtatgaatcatgatatacaattattacatcacgcccttttcttcaagcacttgtattaaatcttccactatataacttttactttgagaatgtagtgcttcatagcaaggtattatatagttatctaaaatatcagtatcatgtttaagaagtttataaactccttctgaatctatattcaacttttctgctaaagcttcaatgcaaaaaatagaaaattctagttttctttcatccattacaaacctcaactcctatccacttatataatatatatatttttattaattaataacttaaaccatcttatgtttataaaaatattatatcataaagtagatattaaaattctatgttacataatatcataaacaaataaagactagcatttccaaatatttcatcatttattttttaactcagggaagatataccacttgaacaatatcctcaactgatattttgatatattaaatttctattataaaaattttattctaattataaatcatatagtaatatacattcattactttataatttgaaacctcttacactaataaaatttgaaagtgctcattattcaatacaaacatgcctaaaattatattttaatttttacactatcaaaaacatatatattaaatttgacccacttaaatacagtaaattaatttctacaacatgatataattaaattatgacaaaagactttgatatttataaaaactttccaacagatgtctcttataagatttttttatataatcttaaattaaaaaactcattaatatgcccctattgttattctgataaaattagtacttataatgatttatttcattgcaatatttgcaatagtaagttttcaattacaactaataccattatgcataaaactaaactagactacagaaaatggctacttgctattaatttatttatatttgatgaaaatattagctatagaaaattatcaaaaaatatcgttgttaataaaaatactgcgtacaagatgataaaaaaactcaattatctatatacatattttaaaattgatattattagtcttataaatactaatttatctaatgaagagatactaagtaatatcttacttattaaaataaaataaaggatggtgttaaattggaatcaaaagaaaaaagtatattgagagcaacacattttggtattataaaaataggtgaaaaagatttaaattgtgctgtactagaaaatggttcaagaatcataaataaaagtacagtattcaaagcttttggaagaacaaagcgtggtagaaaaaaagatgaaattcgtgtaccttctaagcctaatctaccaagttttattgatgcaaagaatctatctgattatatttcagatgaattagaagatatgcttataaatacaataaaatataagactaaaaacggaagaattgtggaaggttatccagctgaaataatacctcttatatgtgatgtatatttacaagcaaggcttgataataaattagctgttcagcaagaaggactagctatagcaagcgaaattttagtaagaagtttatccaaaatagggattgtagcattagttgatgaagctacaggatatcaatatgatagagatcgtgatgagctgcaaaaaatattgtctatgtatatttctaaagagtttttaccttggacaaaaagatttcctgatgaattttatagacaaatgttcagattaaaaaactggacataccctagaccaagttctaagagacctggaatagttggaacatacacaaataaatatgtttatgatttattacctcctggagttaaagaagaacttcaaagagttaaccccacagtaaaacctgggcaaagaaaacataaacatcatcaatttttaacagaagatataggtaatgatcatttaaaaaatcatttattaaaggttataaccttaatgcaagcatcaaaagactggaaagatttcaatgtgctttttaatagagctttcaatctacctgtacagctcgaaatcgaatatgatgaataatagactatagcctttaacaacgctttaaatacttttaatttatattataaaaatagaattaacttatatcataaaagtacttattagtataggtacttttatgatatattatttaaattttatatataatatattgtctatatacaatagtcttgttagtattaaacttaataattctatgtgtttattatcttaacatttttcaattccttttttacatcttatttttttaaatacaattaaaaaatttaaattagcatcccacatagataataaatttgttctatacttatacataatcttataggattctgtatatcattataactagtaattactctaatagattaagtagcacttatatgctttaaacttctttatccttttaatcataagtttaaacaagttatatatttcctagattgaaataaaaagcataatataaaaacaattcatcagtataaaatatttattgtattatcatcaaattcactatatctctaaaagtattctttatatgttccatggattaatcaaatgcaccccaatataccccaaaaaaatctctttttctgtggttggggcacggttggtggatttcatctccaaaacaaaaaacactagtcaataaagactagtatttccaagtatttcatcattcttttttaaaaattggtggagacgaggggagtcgaacccctgtccgcaaatcttttccttgctgcatctacatgcttagccaacttcactaatatctcacctcacatagcgccaagtggcaggctctatgcttagccagtcccaattaatctacttcaggtcgagacacccctaaagtagttccctgcataatgacgtccagtcttagtcggcaggaggactaagagggacgagcagcaactaggctgctatcgcgaaattatcgtctgcgtttattttaaagttccccagtttttacgtgacccagagtaacacgacatgcagcctcaagttccaaacccacgtcgaaacctttacgcccccttgagtagtttatagtccagtagacttttcgcaaactttatcaccatttttattaaatttttaatgtatatataatataatacttttaagaataaaaatcaatgttatgttctagataataaagaattttattctaaaaaatacagttttatctagtttaatacttacctgtcatttctctttctatacgtctttgtgcatctttcttagccatatcttgacgtttatcatatagttttttaccttttgctaaggcaatctctactttaactttaccgttttttagatacaaactaagtggtataagtgaatacccctttatagtagttgctccaataagttttcttatttcatgcttatgaagtaatagttttctaactcttaaagaatcaacattgaatatatttccttgctcatatggacttatatgaacttgttttaaaaatacttcactattatctacagatgcaaatccatcacttaggttaactttgccttgtcttattgattttacttctgttccttttaattcaattccacattcataagtttcttctataaaatattcatgtcttgctcttttgtttgttgctaatatttttttaccagccatataaatctcaccttctttgttagaaatttattccataaatgttagaaatttactaaatatttaatgttgccaaattatttgactaacttgtatgataacatatttaggcattttagtcaatatttcactgatatattaagttagttaggctatatataattaagtaatataaagatatgaaaatagctaaaaaactacttcgaatatacttaatactaaactaactttaaccagtaacactgatttctaaatttcaaaacaaaaatattacatattataaattttctatcttctatcttctatcttctatcttctatcttctatcttctatcttctatcttctatcttctatcttctatcttctatcttctatcttctatcttctatcttctatcttctaaataattttaacatgcccataaaatataatacccacaaatgataaataatactcaaaatatctattgaaataactatacatccttaaataacttaacttaaatctaaacatttcaaaaacttcttaaaaatatgtaaaaatttgatgataaagtagcgattttttcaaaaaaaatgtaatatagagttatatcttataatattttagagataaattttatcatagttgggagaaatttgtatggatttaagcaaaaaagtaaaaattttagaaaatgcatcagatggcaaaagcgaatttgaaatattagaatttgaaaaacttgagggagcttctagcccattaatggcaatgggattatattttgctagagaagctggtttgaaagctagacaaattaagataaaattaaataattcatcaataaaaacagaagctggtgcattatactattataaaggaaatatatcttctgaaactaagattggtggtgttggaggtctttttaaaaaaggaatatcaggagcacttactaatgaatcaatgatgaaacctgtatacaaaggtactggagaagtttatttggaaccttcttttagacattatttatttatgagtcttgataatgattctataattgttgataaaggattattctattgttgctctgatacaatagaagtaaaagcatttacacaaaagaacttctcatctgctttacttggtggtgaaggcttcttccaaatagaattaagtggtactggtgtaatcgttctggaatgtgttgtacctcaaagtgaaattgtagagtatgaattgaaaaatggagaagaattaaaggtagatggtaactttgcaatagcaagaacatctggggttaatttttctgttacaaaatcagataaatctttaattggttctgctttaaatggtgaaggtttcttaaatacatttactggtaatggtacagtttggctagctccaactcaagtaatgtatgaaaaactaagttttggagcaatgcctactaatgataatatgaataataaagtttctaagcaaaaatagttgttttataaatatttattaaatcattattgattttataaagtcactataaattttattagattattattataaaatcagagtgtggaaatgtttatgtgtattctttaaataaaaatttccacattctgtaaggttattatacttgatatataaaattcaatttaggaacatagtctaacatttataaacatattaaggtaatgatttctcttggtaattattctcatatcttattctttgattatatttatcttattcctagcccttatgtcatattatatttcttatcttattatttataattagcattaacttatctaaaatcttgtatttttttaatagtaaagtttacatctatattaaaaagtttacatctatattaatttcataaaacaatcaaggtagtcaagagattcaactttatttgattttaaaaatttaagtgaatttgttcttatacacatctttttaaaattatatctgtagaaaatatcatttagagctataattaaattattaaattttagaaaatttattaaaaaatataagttaaattaatatttttaaagattcttttttataactactagaatactaatttagtagttattgtatctctaaagtttaagcatggatagatatacatttgataatttgcctataatttacctactacttggagtattggagcaaatacaatatattaataataagttcctaaaaccaataaattaactaatacacataaagatattgatgttgattatacaactataagaaacagatttaacagaatttaatcaagctaagaaattacatatatcgtgatgtttttgaattagaaggtaattcaaaattagtttatagtcttctgtgaatccaataaaaagtacagggtacaagaattgttagtaaaatttttaaagattttatggatagatataaatagttttacttattttgtaaaatttaaaataccattaattaccttaaatattttaataggaggacatatgaatttaaataaagttaaatttactgaagaacatgctattgaagttactaattggaaatatgaaggtaaatattcaatatacaacctacctccatgggaggaaattaaaaagaagaatttttcactatcaaaagaagataaaagaaaaaattttataagttttataaatgacaataaagaattgataggttttataaacttattggatgaaggaagttatgtattctttggtattggtataaaaccagattattgtggaatgggaattggcaaagaaataattagcctaggattacaagaatgtagaaataaatatagtactaaaccaattgtattaaatgtaagaacctggaacatgagagctgtaaaatgttataagtctcaaggatttaaaatagttgagactcaggtacagaaaacgcatttaggggatggagaattttttgttatgaggtatcaatagtttataacactagtcatattgctaatatgacaattaaaatgaaaaaatacatgtgtgtatgtcatagcaataagtgtctttgaaatataaatttgagagcctttgataaaattcggtatacatatatattttatactacagatatataaatctatctacatacataaagagattgtaagtaggtttgtgtatataaaaataaatttatatttcataaatgtactttttatttgtattacctttattttatctaagctctcattttattacctaatcttcctttttattggttttattaagagagatgcaattatcaacacaacacttccaagtatcagccaatatttctcatcaaaactaccttgactcatagacattataaaaaattttccaacatacttgcctttagtcatcatatttaaaattaaatatcctatagatatcatgtaacctatgattgtattattaaataaatttgagaaaaacattcctaaacttcctataaacatagctgatgcgaaacttccaataatatactcaactactggaaaattacatccaagatatattaaaacatttacaaaacctatgattaataccactatacctataattgacatcagtatcctaattaattgtacaataacttgagataatgattttgaagatactatctcatcaatttcttttgattgctctagcgaaaatacaggtaccaacattactatccctattattgcaacataattttctaaacatatagctgttgaaattctgtctaaattagctactccttgtattagaggaatcatacatagcaatataattgaacatattaaattagttaaagtgcttaatttgaagttttcttttattagaactaaacagttttgaaaactttgcccaaacatcaagattcccccttcttttttgctcatataagaatatagctaacaaaacaagcaccaatgctcccaagcttatcacaattctattaatcataatttgattgaagttttgtataataatatccccatttaatacactattatgtcttatcattagccccattgttgaataatcacctttgagtcctgtagaatttatactgtaaagccaccaaattaattgcacaataattgctactggtgtatctgttaatatagtaatactcattcctacagctgtaactatcataagagttggtagtatccaccataatgtatattttataaatgctaagttatcaatagatatacctttatctttagcaaagaaaatcaaaggaagtaaatctttcatacctaaaattaatacaggcaatatcattataaagacaagtgcaaaatatcttgataaaactattttgcatgaagatacttgttttgaataaataatctctctcattcttgaacgcttatctttaagtgacataaaaactgccacaaatactggaaatatacttaaaactatacctatataatcgcaaaaaattcttgcatacccattactaactttatctttttgtattgtatagttgtaattcttcatagcttcatcataggtaactggaactactccaaatctttgtaacttgtcaaaagcatatgcagaccctcctcctaaaatgtcgtctactctttgcattatttcttcaaatctttcaagagatactttagaataatctatttttatactttcatcagttttccaaattaaatttatttcgctaatacttttaccagttatttcttctatatatttttctatggtcttcgttttattttggtctaattttatatacttaactacccctgttggatacgttgtatatgtgtttttttgatattctctaattaggtttatagttgcatttggaatgaccttttctgttttcatagattctttttgaccatatggatattgattgtgtacagagtaatattcgtcaatattctctactttttgtggagcaactaatggatttccatcattaggaatatttttacttacatcatttgaaactgaacttccaagttgagaaatatagaaaaaaactaaaactacaataaaaatataatataccatactctttaatatatttttacattcttttataaatagattcatatattatctcctcccattataagcatatagccatcttcaatagttggattacaatttactgctgtctcaaaaggtttatcatctgatataatcctaagtatagcctttccaccatgagtcaacattcctataactataaatctactttttatattttcaatgtcttttttatctacttcaatactatatactttcccttcagctagttttgctaatgcttctgttgagccattgtatatgacttttccactatccaatatagctacgttttcacatgtagcttctatatctccaacaatatgtgtagataaaataacgattctatcatttgcaatttcgcatagtaaatttctaaatcttatacgttcttctgggtcaagacctgctgtcggctcatccactattaaaactctgggattatgaattaatgcttgtgctatcccaagccttctattcatacctccagataaagattttactttcacattttgataattagtaaggtttactttgcttaataactttgctataatttttcttctttttcttagtggtatatccgataaaactgctaaataatccattgctttatatactgtcatgttaggatacattgaaaaatcttgtggcaaataaccaaccatatttctaatttccttagtattctcaataggaactccacacatatgtattgaaccttctgtttttgataataaagtggctaaaattctcataaatgtggtttttcctgctccatttcttcctaaaagaccaaacataccactgtcgatttcaagatttatattatcaagagcttgttttttcccaaatcttttactaagattggatactgctattttcatttccatatataaatacacccccagaaataattttatagaattttatttttataaatttttactgtattttcataataaattctaaaacttaagatattatttataaatttctaaattttttctaaagattttaatttttctgtttttaattaaattaaagtatctttgtttctgaaattttttaagtttatgaagctataatttaatatatatttattttatttgtgagtctatttttatatataatgaaaaatgtgataagtatccaaaagaattactggatataataagatagggtatttagccttttaagataaataaaaatatctgcaactatatattgcaaaaatttaaaactaatttatatatgctaatataaatatttataaagacataagacaaatttacctacagatttaaatttaacttatatattttaaaaggctaatataatatgtattttcttctatacaatcaaaaggcttcatatctaagatatgttatgacactaatattcacaattttttagtaattatcacattataaaaaatattacagctagtccatcatcagatgcttcttgtataaactttttaagctcaattagatttgcccatacatattcaaaaaaatcatcttcactctcatcattcataacaggataaatattattttctaacatctcattaatattaaatctttttctaaatgcttgttcttccaaactgttcattgcttttgatagtttttttacatcatttgctgtaatcaacatgacaggaaattctccatcaatttccataagtatgtttccacttagtactaatttgctaaatatattctcatcatctccaccaaaaggacaacctgtcaaagtaaagtgaatggcatgccatgctttatcaatattgatagtactattttcgttggcatcttcaaaaacaaaatcttgtaaattttcttctgcttgctgtaatttaaaaacattctcttcacttattttagtataacatcctatcatccccataattacattcctcctaagtagcgtttttttaattgtaacttataattaaacttagttacaataaaatatattgagaaaagtattatttcatcttaaatttaaatacctatattatcaactaaaattctgtgtttatagcgtaagtattattattttttcctaaaaattaaatgaatcagaagttctataggcaatattgactataaataagaactattacttttaaaaaaaatttaagaaattatactgtagaatcatgctctacttattagcttcaaataaaaaataaatcatgttctcaaattaaataataaataacaataaatttaaattttaaactataagagtttctgaagtgttaataagcataccaataattatatgtgtaagaatttgatttaatagatatgaataatttttacattaattataaatatattaacctattattataaattctataaaaagaaaagttatcttaaataaaaaataagtgtatcttaaattttaaatgatacacttatttttatattgaaattatattttttaatatctattcttaattaggtatttttaaattatctgtttacattaaatatctcttaattacttatctttcagctagcttcttctattaaatgtttctcaattacttatttttcaattagccacttctattaaacatttcttaattacttatttttcaattagccacttctattaaacatttcttaattacttatttttcaattagccacttctattaagcatttcttaattacttatttttcaattagtcacttccattaaacatttcttaattatttatttttcagttggctttttctattaaatgtttcttaattacttatctttcagttagctctttctattaaatatttctcaattacttatttttcaattagctactttcattaaatatttcttaattatttatctttaagttaactatttccattagatatttcttaattacctatttttatcatttattttatagagtattgtgcactatatatttatacatatcataaatactacaacttgttatctcttattttagctgttttatctactcctctattttttcaactatctcaaagtcaatttctttaaaatctacattaacactttcaacctttatcttaacaaggtctcctatcttatatgacttcttagttctttctcctaaaacactataagaactctcatcataaatatagtaatcatcattcatatttgcaagtcttatcaatccttctatagtattatctaactcaacaaatattccaaatgaagttacgctagatacaacaccctcaaattcttgaccaactttatccttcatataaagagccttatagaaatcatgtacatctctttcagctaactctgcctttctttctttctcggatgattgaacagatgcataatccactatagtagtaagctgttcttgtctttttccacttattttattatttaaagattcttttattattctatgaatttgaaggtcaggatatcttcttattggtgaagtaaagtgacagtagaatttagctgctaatccaaaatgtccactacattctggtgagtacttagcttgttttaaagaacgaagcattatagtactgatagctccttcttcttttttgccctttattttctctattataccttgtaatgcttttggatgtacttcctctttatcaccttttattatatatccaaatgtagatataaacttactcaattcttccattttttccaaagatggtgtctcatgtattctatacacaaacggtattcccatccagtaaaaatgttcggcaattgtctcattacttataagcataaattcttctattatcttattagatattcttctttcatatggctttatatctacaacttcgccttttccatttagaattatctttgcctctgggaaattgaagtctatagctcctcttttttctcttcttgacataagaatcttagctaaaatttcagcatttttaaaatcttcaacaacatgttcaaaagtctttttaagtttttcatcatccttttctaatatatcagatacttctgtataagtcattctagcttttgaatttattacagattcacatatttcatgtttaaccacatttcctttatggtctatttccataaatatagaaagagttaacttatcttcaaatggatttaagctacatactccatttgaaagagtttttggcaacattggaattactttatctactaaataaactgatgtagctctttttaaggcttccttatcaagtttatttttctctcttacataatgtgtaacatcagctatgtgaactcctagtttgaagtttccattaggtaatacttctattgatatggcatcatctaagtcttttgcgtcatctccatctatagtaaatatgtttaaatctcttaaatctcttcttctttttatctcttcttgaggaatctcaacagctacagcttctgcttcttgcaatactttctttggaaattcttctggaagaccatgttctcttattatagaatctatttctacgcctctttcacctttttgacctagtatctctataattttgccttctggttttctatcctcttgtggccatactgtaatttcacatactaccttatcattatctactgctccactaaaatgttttttaggtatatatatatctttagtaaatttcttgttgtctggtgttacaaatccaaaagttttacttgattggaaagtacctactattctagttatttctctctttattacttttactattcttccttctgctctcttttcttcagttgcaggtactactatttctgccataactctatcgttatgcatagcaccatttatattgtcacttgagataaataaatcctgtgtatattcaacatcagattctacaaatccaaaaccctttttgtgtgatacaaattttccaacaaagtatcccatttgattgggagatactatttttccttttttagtaaagcagatataaccatcttcttctaattcatttaaaaaattataaaacattggcatttctgatgaatgtatatcaaatatttctgctaattcttctttttttagaggattatatgcactttcatttattaatcctagcaaactttctttaagtcctggtatcatttttccctcctgttttacttttcattatattattatttatattgtcttttatatttcttcagataaaacattttttacttatcacataattttctatattttcttattattattacaagttaaaattacttatttatatttttgatttaatgtaagctttgtcatactaacttcaaacaaattatgatgttttataaattatttgtaaatatcattataattacttaagttattctttatcataattgcttaaattactctttatctcataattatacaccatcaaataggattggtaaaatattcatctcatataagtattactatataataatttattctattagtatactcaaatcatgtaaaatttatataactcaattaattttttaaatacaactttataatataaaacttataataaaagtaaatttatatgttaaatgaggttgattttttattattttttatttatgctagtactaaagacttgcaaacgttttttgacaagtctttattttgtctaaattaaacaaacttttttacaaataaatacataaaatttaaactaatctatttattggaggagataaaattggaagaagtaattgcaaaaattattactatagaaaatggattcaaagaaattgaaaacattgctaaaaaaattgtaaaaaataatgactcaaaaaagtgttattatctatcaatctacttatataggtcagaatattatcaagtaagagaattggctgtgtttatacttggttttatatcagtaactatttctgaagctttgttatttttaaaagacaatgtgagtaaagatgaaaactggagagtacaagaaatactagctaaatcatttgattattattgcagtgaagtaggatatgaaaaggcacttcctgttataaaagaatggcttaattctgatagtccaaacataaaaagggctgtgacagaaggtcttagaatttggactagtagagactattttaaatctaatcctgacgttgctatatcactactttctagtttaaaagaagatgatagcgaatacttgagaaagtctgtaggtaatgctcttagagatataagtaaaaaatatccagatttagtaaaaaaagaattagattcatgggatatatcaaataaaaaagttgagtttgtatataagcttgcttcaaaatgtatcttggcaaagtaaaatggaggtgaacttatttgaaacttcgtgatgagtatacttgcccattagaactaacacatgatatgataaaaggcaaatggaaatctattatattatggagattacgcataggaccaacctccttatcaaaacttgaaaaggaaatcaatggtattaatcaaaagatgttacttgaacaacttaaagaattaattgaatttggtcttgtagataaaaagacatataaaggttacccacttaaagttgaatactcacttacacctattcgagggaaacaaatattggatgctttggctataatgcaagatataggaattagctttatgttggataatggtatggaagatattcttaaggaaaaaggtgttttaaaataaatagatacccacaaaaaagtaagtaatttaccattattttcaactggtatataattaaattatagatatattctattaatttattataataggaggtaaattattatgaaagtaactagtacaggtatagtaaatggtgttatagaagataaatacggtaaaagaggaactcagttcaatgaaggtggtatgcctacatattcactacctctaaagtttgaagatgctccaaagaatacagtatcctttgctgtatttttagaagataaagactctgttcctgtatgtgggtttgcatggatacattggttagctgtaaatataacaaaagatgagttaaatgaaaatgaaagtgtaacagctactgattttgtacaagggactactagttggcatggcaaactaggaggtcttgacagattagaggccagtgtatatggtggaatggctcctccagacagacctcatgtctatgaaatacatgtatttgcacttgatactatccttgaccttgaaaaaggattctatatgaatgaatttttcaaagctattgaagggcatgttttagatacatttacactaaaaggaagctattctaattaattaggtttactatagctaatcattaattaaatgctacatttaattgatgattagcttaattgttattagaatattttctgcactttatcttaatatatattttagttgactggtattttaatttctattagattattatcaatttatataaattgattttagcttaaaacttacttatctatttcagtttctattagaattattattagactcattaaaataaaagcattaatataactaataatatatgttaaattcattaactctacataaagttttataatctaaatgaaatacaataatctgcataaaattcaatagcttatataaaatttagtaatttatataaatattatcaatctatataaaatttaataacttatataaatttaactaatttatataaaatcttaaggagttgccatgataaaaaaaatagagcatgtggtcattactaataataatatagaaaattatatcaatttttataaaaaatttggtttttcatctaaagaaatgagcgaaaagtataaacttaaggctagaaatgttaagataaatcttaacataaaaggttataaatttttaccttatgttaaaaatttaaaagcaagtagagataacttatgttttaaaataaacacaaatattgatgagccaaaaaaatacttagaacaaaatgagattcaaattaagcgaggaattgtagaatgtacaggtgtctttggtaatatgaaatctatttatttgaaaaaaactaatggaaatttaattgaattatcaaatcatagaatcacggagagtaaaccttggaaaatttaatcctatcaataaatgttgttcttcctttgtttctcacaatgtcacttggatatgttctaaaaaaattaggtctatttgatactcatactttaaataaaatgaataatgtctgcttcaagtctttcttgccattattattattttttaatatatacaatacagatttagatggttctcttaattttaagcttatggctgtagctgttataattattttttcaatcttcttaatcttagtctttattattcctaaaattgaaaaagataataagacaaggggtgcattaatacaaggtgtatttcgtagcaatttcgttatatttggtattcctgtgacaatttcactatttggcgataagagtattggagtcacatctttattaattgcagttattgtacctatgtttaatgtattatctgttgtaattcttgaaatttttagaggtggcaaagtaaatataagacatatgattaaaagcgtcttaacaaatccactcataatcgcctcttttataggattgacaatgctaattttaaatattaatatacctacatttttacacaaaactattggtgatatttctaaaatagctactcctttatcacttataattctaggcggatcttttagtttttctgctataaaggggcatataaaaaccattatattgggcgtatgtggaaaacttatacttgtaccttctatatttttaccaattagcatttttcttggatttagaaatgtagaattaacttcacttatgataatgttatctgctccaactgcagtttcttcatttacaatggcacaacagatggattctgacagtgaattagctggacaaattgtagtatttacttctggattttctataattacagtatttttaataatatttattttaaagcagaataatcttatttaatgatatttgataacacaaattggtattatgagaaacatatataaaattgatttaattgcgtaaaaacatattattatactatttttactatataatataactttgtgtatattatctcattaaacatggtgaaagtagtgttgctatatattttttagtttgaaaaaaatatataaatataaacaatatataaatacaaataataaatgccaacaaatagtcaatctataaaataaaaactggactaatcatataaaatcattagtccagcttttattttacgtactttttatgttgatgtacttttattaaaaactaaatttaatttttaaatatctagcaaatgcactaattaaataatggccagttattcaacaatatcactacttcttaactataagtaatgccaatgcatttataaaaaataatactgctgttatctttgtaactctagcaagaaatgcttgttttccttttggtttaaagtaagcttgacttccttctccaccaaattctgaaggtaaagcattttttgaatcttgaggcattatgctaattactagtaaaatccctagcactacttgcacacccattaaaatgttgctcattattgcccctcctatctatttattacttaaatttcattactctttagtgtatcacaataatatagtcatttcaagactattgaagtataaataacaaacaaaaataatatgcaattactatatcttttttgaataacgtacttctaataatttttttccaatatgtatctctttctcaaaatcatcacaagtaaaaccattttttttatagaaatttatagctctagtattgtcttttagaacccatatcgttatatatgaatatcctaaattgcttaatctatcaatgcaaaattgtaatcctttttttgtcacagatgttccccaaaaatcgggatggaaatatatagaatatatttctccaacacattttggagcattatcctcttgacttctatttaatgaagcaaaaccagcaggtataccattcactttaaaaagataatattcctcttcagcttttggaataacactttgaaaaacttctgctcttttctcagaagtgaattcatctattatcttatctggaataattcctttatacgcttttctccacgaacaagaatgtataaaacccatttctatagcattttcacttgtagctcgtataatctctaaattcataaaaacaccatcctattgacaaattaatacgattatcgtactatattagtgcgataattgtatcatatatggaggtaaaagtcaatgaatcctgtaaaagagctaaacaacctgtggcatattgttagtatgcagatgaaaacagaaatgtgtagtggtaagtatcctactattcatggtatttctttagtagaattaagtattttagaaatagttgaacagtatcccaatagtatgatgaaagaaattagtgaaattttagaattgccaaaaagcacattaacaagtgctgtaaaacgtcttgaattaaaaaaatttattaaaaagaatccctgtattaaagacaaaaggaggtataacttagtcttaactgaattaggtttaaaggctcaacaagaacatagagacatagaaataattgtatttagaaatctcttacatcaattagataaagatgaaatagaaacttttattcgtattttttctaaagctgtgaataaaagtaagaaatgaaatataaaaaaaggataagtgaattgaaaaatcaactatcacttatcccttataagataaatttttatcttttatgttatctttttaatctttaatgccatatttttaatcttcaataactatttttttaaattatagaaagattttaatccacagtatctagcttgttctccaaccatttcttctattcttaataattggttgtacttagcaactctatcagttcttgatggagcaccagtttttatttgaccagcatttactgcaacagctaaatctgctatagtagaatcttcagtttctcctgatctgtgagatataacagcagtatatcctgctctcttagccatttctatagcatctaaagtttcagttattgtacctatttgattaactttaactaatatagagttagctactccattttcaattcctttttctaatctctctgtgttagtaacaaataagtcgtcaccaactaattgtaatttatttcctaatctttcagttaataacttccatccgtcccaatcttcttcgtctaaaccatcttctatagttattattgggaagttgtttgaccaatcttcatataaagcaaccatttcagcagcagttaactcttttccttctcctgctaaaacgtattttttagtttctttgttgtacatttctgtagcagcaacgtcaagtcctaacataacatcttcacctggcttatatccagcttttgttatagcttcaactattaattctaaagcttctctgtttgaacctaagtttggagcaaatccaccttcgtcaccaacaccacaagctaatcctttttctcctaaaactttctttaatgaatggaatacttctgctcccattcttaaaccttctttaaagcaacaagctcctactggtaatatcatgaactcttgaacatcaacgttattatcagcatgctctccaccgtttaatatgttcatcattggaacaggtaattgtttagcatttactccacctaaatattggaataatggtaaacctatttcatcagcagctgctctagctactgccattgaaacacctaatatagcattagctcctaatttacctttgtttggagttccatctaattctatcatgattgcatctatagctggttggtcaaatgcatccattccttctatttcaggtgctattatttcatttacgttagcaacagctgtttctacaccttttcctaagtatcttcccttatctccatctcttaattcaacagcttcaaaagctcctgtagatgctcctgatggaactattgctcttcccattgctccatcttctaatactacttcaacttctacagttggatttcctcttgagtctaatacttctctagcatatactaattcaataactgacatttgtatatctcccttcgattttctattagttaaattttcatttactgtaaacatccgtctactattttaatctactttctatattatagtacataaagttgcttttgaaaattaggtacaaatttatttgatgggtaaatttgtaaaagttcctatttttattttattttttataatattttaatttatataatataaaaaaacttgtctaaaatccaaaaccaatcttaaatacacaaatattataactagatttaaaacattaaacataaaatgtacaactaatgattctaaaatttttgcttatataatatatattaattattattatttatattgttattgtctatcttgttattatttatatcattatttacattattatctatattataattttttattttataaattgtctatcttgtaaattttataaaatataccttcatctacaccttacaatatccagaacttacaaaatctaaatcttatgtcataaagtctaaactttacaaaataaacctaaactgcattatttttaaatttatattgtagtttatatattattctctacttatcagaatcgactattttgaaataagtgaatgaccagtcatttcttctggcttttctaacttcatcatatctaaaacagtcggtgctatatcagataatcttcctccatccaataattttgcactttcatattcttgaccaactacaataaatggtactggattaatagagtgagccgttacagtttttcctgtttccgggtctaacatatattcagcatttccgtggtcagcagttattattgcacttccacctaactctactattttatctatcaattttcctacacaagtatctacagtttcaacagcctttatagccgcttctatacttcctgtgtgacctaccatatcaggatttgcaaagtttaatactataaagtcaaacttatcttctcctaatttatctaaagctttatctgtcaattcatatgctgacatttctggttttaaatcataagttgcaacctttggagaaggtatcaatagtctttcttcacctttatttggctcttctactccaccattgaagaagaaagttacatgtgcatacttttcagtttcagcagctctaagttgagtttttccatttttagctagatactcacctaaagtgttggctaaagattgaggtccaaatgctatatgcacattctctatagttatatcgtactctgttaagcatacaaagaagtttttaatatcttctcttttaaatccatcaaactcttcacaaactaaagctctagttatttgtctagctctatctggtctaaagttgaagaatataattgaatcattttcctttatacttccaactggtttatcatctttcataataactgttggcattataaactcatcattttttccatcatcataagagttttgaatagcttcctcaatagaatttgctttttcaccaatacctctaaccatggcattgtatgcaagttctactctttcccatctcttatctctatccatagcgtagtatctaccagaaactgtagcaaattcacctactccaatttcatccatactagcttgtacttctttggcatattctaatgcactttgagggtcagtatctctaccatcagtaaatgcgtgaacatacaccttttgtacgcctttatcttttgccattttgattatagccttaagatggtctatatgtgaatgtactcctccatcagacaaaagtcccattacatgaagagaattttcttttgcattatccattgcttcacataaaactttattagcaaaaaagtcaccatcttttatagattttgttattctagttaaatcttgatatactattctacctgcacctatgttagtgtgtccaacttctgaatttcccatttgaccatcaggtagaccaacatcaagaccactagcatttatcaatgtgtttggatactctttttttattctatctaaattaggagttttggactcagcaattgcatttcccttaacatccttattgtatccaaacccgtccataataattaaagcaactggttttttcatcatttcactccttagaaattaacaaggtctaggtaatcattactagctaaactagctccacctactaaagctccatctatatcactttgacccattatttcggctacatttgaaggtttaacacttccaccgtattgtattctaacttcattagctaattctccatataatccttttataacttctcttatataagatataacgtcattagcatcttcagcagttgcagttttaccagttccaatagcccagattggctcatatgcaacaactacttttgataaatcatctttaagaacattttctaaagctttttcaacttgaactttacaaacatctttagtttttccagcttctctttgttctaaagtttctccaacacataatattgggtctattcctacttctaatgcttttaaaactttcttgtttacagtttcatcagtttcattgaagtattgtcttctttctgaatgtcctattacaacatagtccatatctatttcttttaacataagaggtgaaacttctcctgtaaatgctcctttttcttcaaagtgcatattttgagcacctatctttatatttgtacccttagtagcttcttttaaatcctttaataaagtaaatggtgcacatataacagcttctactttatcagaatttactttatctttaacttcatttacaaattctaaagcttcttttattgttttatgcattttccagtttcctgcaattataggttttctcattttacaatctcctctatatattagtttatttattatctaatgctgcaatacctggtaattctttaccttctaaaaattctagtgatgctcctccacctgttgatacgtgagtcatcttgtcaccaaatcctaattgattaactgctgctgcactatctccaccgccaattacagtagttgcatcagtcaactctgccatagctctagctactgataatgtaccatttgcaaagttttcaaattcaaatactcccattggcccattccatactacagtttttgattcttttatagtttttacaaagtttgctatagtcttaggtcccatatctagtcccatgtaatcttcttttacattagcatcttctgttactattggagtagcatctggtgcaaagtggtctgccataacaacgtctactggtaataataagttaacacccttattattagctttttccatcatttctttagcatattcaactttatctatttcaagtaaagaagttcctacttcataaccctgagcttttaagaatgtataagccattcctccacctattattagattatcaactttttctaataattcgtttataacagctaatttatcagaaactttagctcctccaagtatagctgtaaatggtcttacagggtttgcaacagcttctcctaagaattttaattctttttgaattaagtatccacaaactctctcttgtaaaaactcgcctgcaccaactgttgagcaatgtgctctatgagcagttccaaatgcatcatttacaaatatttcagcaagtgatgctagttctttagagaaattctcttcgtttttagtttcttcttttctatatctagtattttctaataatactacatctccgttttccattttttcagttgctttctttgcattttctcctacaacattatcgtctgctgcaaatacaacttcttttcctaacatctcagataatctctttgctactggtgctaaagataattctggtttagcttctccttttggctttcctaagtgagagcataatataacttttgcccctttagaaattaaatattgaatagttggtaaagctccgttcaatctattttcatcagtaattacaccatcttgtaatggcacattaaagtcacatcttactaatactttttttccgcacacatcaatatcttctatagtttttttgttaagcattgacataaatatctctccttttaataaagtaattttttattgccaagtataatatagtacatacttttaccctattaaatatatcatattatcatatttttatatatagtatgtaacattatttaggtgtattttatatattttttcttaaaaaaagtcctgagtccgtagtattaaactacaaactcggactttgtcaatctacttttctattttctcaaaactgactattttgctaattgtgcaaagtatcctaaagttcttattaattgagaagtataagacatttcattatcataccaagaaacaactttaactaattgttttccatctacttccataacttttgtttgagtagcgtcaaataatgaaccgtagcttattccgattatgtcagaagatactaacatttcttcagtatatccgaaagattcgtttgaagcttctttcatagctgcatttatttcttcaactgtaacattttttcctaatgtacaaactaattcagttattgaaccagttacaactggtactctttgtgctgccccatctaattttccttttaatgaaggtattactaagcctattgcttttgcagctcctgtagtgtttggaactatgtttccagcagcagctctagctcttcttaaatcaccttttggatgaggaccatctaaagtattttggtcattagtgtatgcatgtatagtagtcattaatcctttttctataccgtatttatcatttaatactttagccattggagctaaacagttagtagtacaagaagctcctgatataactgtttcagaaccatctaatatgtcactgtttgtgttgaatactattgtttttaaatctccagtagctggtgcagatataacaactttcttagcccctgcttgtatatgagcttcagctttatctttagatgtaaagaatcctgtacattctaatactatatctactcctaattcagcccatggtaggtcagcaggatttctttctgctgttacttttatttcttttccgtttactacaaaagcaccttctttaacttctatttctccgttaaatcttccttgagctgtatcatatttaaataaatgagctaacattttagcgtctgttaagtcgtttattgcaacaacttcgaacttatcttgttgctccatcatttttcttaatgctaatcttcctattcttccaaatccatttatagctactttaaccattttcgctacctcctataaagtaaatgtatgttttctagctctgtgctaggtcttgacttttataataatgacaatatcttataagcactttcttcatctgttacaagaaccatgtttttatgcatatttgatatagctaataaggcttctactttttcagtccctgcaaagattgcaatagtttcttttacttgtttaactgtttctaaatcaattccaacagtgttcagtttgtaaactatttctccatctttgttgaaataatatccaaatgcttctccaactgcatttttagataatatctcatcaaccttgtcttctggaagttttcttctctttgccatgacatctgctctacctatactaaaaactaaaatgtctgttcttttaatatactccaaagttgtcttaatctctggcacttggctaagagttttcattgcactttcatccaactcatctggtatatgtaaaagtttgcaattagaatgtaatttcttacttattgaagcaactatattgttagattgcatctctacatcagttcccatacttcctctagctggaactattgtagagtttggatatctcttatcagttttaataacgtttgaaaactccaacatagtgcttcctcctgttattgaaacgatatctccatcttttaaaatgcctaagaaatactcgcatccatatctagttacatcttttagtaaacttccattttcatcacagcttccaggaactagtattaccctttttattccaagcttttctctgactctatcttgtaacttagacaatcccatgatgtcactcatgatgtccttaagtttatctaacaaatcagaaccttctttagtgatagtcatcccagatacagctacgtctataagtccttgttcttttaaaaactcagtttctgacctgattattctttcactaatctctaatacatttgataatgttctcctacctattggttcacttaaagatatttgtcttaaaatagagtatcttctttccataagttcaattgcctgtggaatcaatttcttttgaatttctaataagttcttcataacatactccttattgctttcctttcgggactttttttgtccctagtgtttatttaagtcccacaagatatttttattttataggatttgcgtatagatttcaatagtttttcaaaaacttttttatttttttattttataaaatatttctccaccattttcaaatcacagtattttttctttttatataaggctttttatatatatttttttatattttcattctaatatttattactataaataattttatttctagttacttttatttctagttatttttatctacaactaagtttacttttatctagttaagatttttatttataccctacgtgttttccttttgtgattattaaatttaataatagtttatttatctaggtattcttctttttctaatatctaattattctttacaaacacttatttaatttaatcattctttataagcacttatttaattatgttttctagttttttagcattttacaatattttaatgttccccagtttttcaattctttttagtatttttatattttataaattttaatattctttaaagttctaatattcctcaaagcctaatgttctttaatgttttaatcttctttagttttttatgttctttgctatcttaatgttttaatgttccccagttttttaataccttatagcattttaatacttttccatattctattattttactttataaaatttttagcccaatctacattcatctcttaattagccttttccccttaccatactgatatttgtcttttacttattagtattcttttctcttacttgaagatgggattcctaattcttcacgatatttggcaactgtccttcttgcaacattgattcctttttcttttaataacttagatatatggtcatcacttaaaggtttctttttattttcgtcttttattgtttcctttataattttttttatgcttgtactagatgccatttcattattctcagtctcaatggcgctactgaaaaagtacctaaattcatatacgccaaaaggtgttagcatatatttaccatttacacctctacttatagtagattcatgaaattctaatttttctgctatgtctttcattttcaaaggttttatatattttgtcccttttctcaaaaattcatcttgagcttttactatctcttctgcaatcttaagtactgtagttttcctactctctatatttttcataagtcctgttgctgaatttagtctttcttttataaattcttttgcactttcatcagactgtgaattttttaatatgtctttataataactattgattcttatttggtaagaatctttctcatttaaatatacaataaattcatcatcaatcttttctactgttacatcaggttgaatgtatacacttttctctactgaacaagttcttcctggtttggggtctaatgtcttaattatgtttattagttcaacacatttttgtaatgacatattgtactttttacttatctctttatatttattatttgcaattaaatttaagtcttttgtaacgatttcctctaaaatttcattatatattcctaaactagccatttgtatcatcagacattctgaaagacttcttgcccctactccactaggttccaactgctgaacactaattaaacatttttcaaaaagttcttcatctatctttaaggtatcaacaattactttttcctcagttcttaaatatccatcctcatctaaactatcaattatatactcacagacttccaattctttgtctgtaagtttatacaggcttatctgaaattttaaatcttcatataaatttgacgaatatttaactaaattttctagattaacttcattatcaggattatagcttatctctgttctatctaaacgtcttgacctatccatgtcttttatatactcttcccaatttatctccccacttttctcgacttcaactaatgggttattctctgcttctctttttatctcttcttctaactctaacttactcatatttaatattgataatgattgcttaagttgtgtagtcattattagcttctgagactgagttaattctagactattattaaaattcattctgctcacctctcaattttattaaacttattttataaaagaaaaaccctcctgtatatgtatattctatcatttaaaatataccttatgcaaaagggttttttttatttacaatttcatctatttttttatttaatatttcttttttttgttacttttttttactatatggagtattttgtagtggtagctcagttctaaattctttatcaaatacataataggcattttgtactgctggtgcagtaggaactgtacaaatttctcctacaccttttgccccataagccaataaatctttgttcttttcaactattaaagcttgtatttctggtatatctgtagatttaaataaacctaatgtaccaaacttagctgtaggaacagagttaactactgggtaatcttcggttagagcatatccaagacccataactactccaccttctatttgaccttctaaactgattggatttatagctcttccaacatcatgtgctgctactactttttctagttttccattttcatccagaattacaacttgtgttgcatatccataagcaacatgacttactggattttctttgtcacaacccattttatctgtaatactttcatattctccataaaactcttctccctctaaatcaagtaaagttttgccagagtctaaagcttcttttaacttatttgatgcaaccttagtagcttctcccgtaaatactgtctgtcttgaagccgtagtattaccagagtctggtgttaaatgagtatctggaacttcatgcactatattttcaggaagtaggctagcagtttcacaaactacttgagtcataacagtaccaagcccttgacctatacaagaagcacttgttcttatgtgaactttgccatcttttatcaccaatctacatcttccaacatcaggtataccaactccaaccccactatttttcatagcacaagctatacctgcacgtggatgcttttcatactcttcttttacagcttctagtgtctctgccattgctgttccttcatctgcaaattgaccatttggtaaaacttgcccaggtcttattgcatttttatatcttatctcccaaggagatattccaaccatttcagcaagtaaatttagattacattcagttgcaaaacaactctgtgtaactccaaatcctctaaatgctcctccaggagggttattagtatatactgctgttcctgttatatcaatatcttgataattgtatggtcctgctgcatgagtacacagtctttgtagcactggtcctccaagagaggcatatgcacctgtgtcagatattatcgttgccttcatacccgttaagtatccattttcatcacatgctgtcgtaaattccatttctgtggcatgtcgttttggatgaacaataatactttcttttcttgttaactgtacttttacaaatctctttgtatggtatgcaagtaaggctgcatggtgttgaacactcatgtcttcttttccaccaaaccctcctcctaccattttgtttataactcttaccttctcatatggtaaccctaacatatctgcacattcatgttgagtggcaaacaccccttggtctgttgaatagattattactccatcatcttcataaggaccagctactgcacattcaggctctaaaaatgcgtgttctgtagcaggtgtagtatatcttttagttacaacatattttgaattttctatcttttctttagcgtttcctcttactaaatgttccttaacaagtatattccctgtctcatgtatctttggagcatcttctctaagtgcatctgctgtagtacttaatggtgttaattcctcataatctatcttaactagctttttggcctcttctaacgcttctctagtttctgctgctactaaaactattccatctcctaaatatctagttatttcaccttctggtattaaagtatcccaatccttctttaagtgccctacctttatagttcctggaatatctttagctgttagaactgcaacaactcctggataagcttttgcttcttctatatctatttttttaactaaagctctaggatacttagctctaactgctgaaccataaatcataccctcaattctcatatcatctacatattcagaatatccaagtgctttgccaactgcatcaactctaggaagattttcacctactagacccttacagtttacttttggcacatctatattttctctaaaaatctttgctgctaaatcgacagctttaattatttttacataccctgtacatctacatatattaccttttaaagctttctttatatcatcttcagtaggattattattaacatctataagtgcttttgaactaattaccatacctggaatacaaaatccacattgtacagctccttgactagcaaaagaatatgcaaaaacatctctttctctctctgataatccctctatagttgttatgtttttcccagctaatttatcagttttaaatacacatgctttagtagctttaccatctattataaccatacatgttccacaagcaccttctgaacagccatttttaactgaagttatattcatatcttctctaaggaagtctaaaagttttttgccttcttttgcaacaactttctctccatttaatataaattctaccattctctagccccctttgttagacgcctatttatatatctcccacttggagtattacaaattaattctccatctctaactacttcttttcctcttaaataaacatgttctatttgacaatccacttcatacccttcataaggtgtataatctacattttgtaattgtttttttgcttctattttggattttttgtttggatttaagactaatatatctgcatcactgcctatttctatagttcctttattaggatacattccaaacaactttgctgcattagttgatgttacttctaccatcttgttgatagatattttatttttacagactccatatgtgtataaaagactcatcctatgttctacacctggagaaccatttggtatcttactgaaatcgtttatcccaagttccttctgtcccttataattaaaagaacaatggtctgttcctatagtgtctatttgattatctaaaatagcattccataatatttcattattttctttatttcttaaaggtggtgacattacatacttagcactttcaaatccatctaaatcatataattcatcatttaatagaaggtattgaggacaagtttcaactattacatccacacctctttgcttagcttttaaaacctcctctaaggattctttacagcttaagtgaactacatatacttttgagtttgcaacttcagctatcttcataagtcttgatgtagcttctgcctccattatagctggtctagttaattgatgatattttggagataaattattttctgactttgctttatccacaagttcacatattatgtccccattttcacaatggaaaccaataatccctcctatctcttctgcttttctcaatgcttcaaagattacaccatcatcaacttgaaggcttcctttatacgccatatacagtttaaatgaagatactccctctttcaccatatcctccatttcattacaaaccgagtcattccaatctgttatagccatatgaaagccataatctgaataggatttatccttagctttttcatgccattcttctaatccgtctttcaaagaacatcctttagcttgtgtagcaaaatccaatatagtagtagttcctcctactatagcagcttttgttcctgtctcaaagttatctgctgtcttagtaacgcctgtatctaagtcaaagtgtgtgtgtgtatctatacctcctggtataacataagaatcactaacatcaactatttcatcattttcttttgatatatcaagacctatatcgactattttttcatcttctattcttacatctgcacagtaagttttttcacttgttactactttcccaccttttaaaacaattcccatatagactccaccttacttgtaatgtatcaatttattttatatgaaaaaattaacttaaagtaatctagttagttcacttatacgtagtaaatctatattaagattaaaccaatacctaattaaattaatattcagctaaactaatatttagttaaatcaatataataaaattattaactttagactgtattattaatgcataatgtgtgtttgtttatctgatatattttattatcctaatacctattactctaagttaattaccaaaattctatataattattactcattcatagcttctacttgattgtagcagatgcttaaagctccttttggacatctagttacacataatccacatccaaaacacttgtctgcatctatgttcaacttatctgtaacttctaaagcttcgtatacacagcttgttacacattgcttacatttgatgcacttgttatcatccactactggagctactgaatgagttctaaaccctctagctgccattttcttatgagttaatccttttatttcattaacatcagcatatccattctcatctaaaaattcatttaattctttagcaatttttccatagatagaaggccctttaaggattgcttctgtacatacttgaacagcacttgctccagccatcatcatttcagccacgtcttttccacaagtgattccaccaacaccgattattggtatatttacaacttgagaagcttcatatatacatcttattgctagaggtcttattggtgcacctgataaccatccgtatccagctttacttcccattatagggtatcctgtatttacatctattgccatacatggtccaaatgagtttatcattacaagtccatctgcacctgcttcttcaacagcttttgcaatagtttgaatgtcagtatgaggactcattttcataaatactggtacatctaaaacagcttttgcagcttttaaagcatttactattggtgcaacgtctgtacctacataatgagtagataattcaactgcatctgcataaggctttactaaaggagcaacctcagctatttgctctgctgaatatcccatacttactattactggaagccctgtttcttttacctttttgtattcttcctctatccattgctcttttggaagctctgaccataattctgtgtttaaaaaaccactattagtttttgccatacatggtcttggtacatcagctggtaatacagatatagtttttgtacatatagctcctgctccaccttttgctgcctcttgacagagagcaccatcttttgctccaggtcctgccgctgtcataattgggtttaaaaattccattccatataaattaacttttaaattagccatattattatctctcccttaaattaaatatttttaatatttagattgtattcttttatttgtattcgttatttatttacttttttatattatttaaaatataagatagttttgttgaattattaatatctctgaattatttttattaatgcttaatgactttaagtcaatatagatttttacttgttttatttttattttgcttcttcaactttattatttttttcttttttagaacctagttcattgaagaatatgtttaaaagcactgctgataaactacctgttgttattccactatggaatattgtttgtacccaagttgggaaattatgatagaaatcgggatttgttagtggtatcatagacaaaccaacactaactgctactataaccccatttttagttccatcaaatttcactttgcttaaagtttttactcctccaaccattaccattccaaacattgcaaatcctacgcctccgagaacaggcttaggtattgctcctattattgctgcaaattttggtaagaatccaagtactagcaatataacccctgcgtaaactgctataaatcttgattttatacctgtaagacctactattcctgtattttgaccaaatggagttattggaaatgaattgaatattccagataatgctgtagatattccatctccaaatagacctcttttaatatttttacctgttacttctttgtctaccatttcatgaatagctatcatattaccaactgattccgtcataagtaccaacataatcaaacacaatgatagtattgcagatggttcaaatctaggcattccaaattttaaaggtacatttaagttaagccaaccaactccatttactgcactaaaatctgccattccaactgccatggaaagtagtgtaccaagtactatacctaccaatatagctgtgctattccaaattccttttaagaatttaaatgaaagtaaagttattgccaatactgctaaagctaatgctaatgagtttggttcaaccgcttccaatttgttgtcagttatccattttatcccaactggaaatagtgaaatacctattaccataacaactgttccagtaactacactagggaaaaatcttattaatttttcaaatactggagcaagtaatatacaaaacaatccagctactattacagagccaaatactgtctgtattgcaacttgtgaatcactatatgatgaggctattgctgtcatacctgccacagcggcaaaactagttccttctattactggtattttagcacctacaatatttcctataccaacactttgtatgagtgttcctatacctgccataaacaagcaagcatttattaaaaaaacaatactagcatgatctagtcgtgcagcacttcctatcatcataggaactgctactgctcctgcacacattgctaaaacgtgctgtagtgaaaatacccaagatttggatacaggtaacctttcatctactggagctattttagggcttttatcttgagacattttgggtctcccttctatatttaatttaatattctattccgtatattttttatttatatacttcatttaaattcctatttttgtttaagctctgtttttaacatctaaattcttgtttcttacttgtatattaatctgaacctcccatgactaaagtcacagggttcctgcttcatagaattttgcataatcaattatttaaattctattccatagattttgacttaattctctactttttgctagaatactttcttcatctatgtttattaactttctatctttcataagtacttttccatttataatagttgtatctacgcttcttccactcattccaaaaatagtgtgtccccctattgtattttctgtcaatggagtatgtggtatataatcaactactataacatctgcataagcaccttttttaagtactcctaggtcatttttataataagctttagctatttttctattgttatcaaataacattgtttgtgattcttcaaatccaactcttgggtcttttaagtgatgtttgtgaattatattggcaacttttaatgattcaaacatatcgctagtatatccatcagttcctaatcctactgtaactcccctttttaataactctattgcaggagaacatccaactgcatttcccatattagattctggattatgaactacaaatgtatttgttttatttaaaagactgatttcttctgcacttatatatatacaatgaactgctattgttttttcttttagtactccaaaatcattgaatctttctaaaaccctttttccatatttatctacattatattgtaagtctgctagtccttcagcaacatgtacatggtaacctgtatcaagaccagccatctctgaagcacatttatttaatgtatcatcagatagtgtaaatgcagcatgaagcccaaacattccttttatcatgtctgtatcatctttttgagcgtattttataaagtttacgttttcattgataccttgttggattgtatttccaccatctctatcagacacttcataacaaagacacgttctaattcccaaatcctttgcaacatctgatattgtaaacaaactgccttcaattgcatttggacttgcatgatggtcataaactgttgttacaccattttttatgcattctatatacgttgcatatgcactgtattttgtatcttccagtgtaagctgtttgtcaagtctccaccataaattatttagtatctctaaaaagttctcagaaggttttcctggaactgccattcctctagcaaatgagctgtatatatgcatatgtgaatttattagacccggcatgattattttcttgcctgcatctataaattcatgtactggatatttagctttcatttcttctgtagtacctatatcttcaattagattatcatttattactacacatccatcttccatatagggatttaaagaatcttggcttattagcctcccattccccactaaaatcataaatttattcctccttaaagctaagatttaatttttaagtacttttcctgctttaattttattgtattttccttcttcaacaacacaatttccatttataattacgtaatctatacctgtagggtactgcatagagttgataaaatcatcacaaccactaactgtatccttgtcaaatataactatatctgcaaaatatccttcttttaattcgcctctatcttttatactaaagcttgtagctgcctttttagtcattttataaacagcttcttcaattgttagtacattcaactctctaacatatcttcctagtattttagggaaagaaccataagctcttggatgtggtttacctgctaaaagaccatctgtacacacattttgctcgtctcttttcatgaatcctattatatgttcttctaatccatagaaatctaccatcccaactgcattttcttcttcttttaataaatcaaacgttgcatctaatgggtcttttcctctcatttttccaatttctaataagctcttaccaattgtatctttattcttttctgtttttacgcttgttacaaatatttggtctattccagcaaattctataaaattatcccagccttctattccatttgctatatcttttttcatttttgctctttcgttttcatcgcttaatctttctattaacttatcagttcctccagaatgtgcccaaggaggtaaaactactccaagcattgtacttcctgctgcatatggatattggtcaaaagatactcttattccttccttttctgctttttctaaaagctctataacttgtggtatatacttccagtttgctttaccacaaaccttaaaatgtgaaaaatgaacttttactcctgattgttttccaatttctatgatttcttccattgaagttaaaattgtatctgcttcacttctttggtgaactacaaatactccgtcatattttgctactaccttacacatctctataatttcttcagtcaatgagtatgcacaaggtatatatataagtccagtagacaatcctatagctcctgcttttaattctctctctgtgatttcacacattttttgaatttcttctttagtagcaggtctatcttcaagtcccatagcttccattctaacgtttccatgaggtactaaataagtttcatttaaacctaccccattgtaatccatcatttttaaataattctctgttgtttcatatttccaatcaatttcatcactttcaccatctagacctgctaaattttttctccaagaagatatatgctcttgaggtagaggggccatagatataccatcttggcccaacacttctgttgtaattccctgtctaatctttacctcattatatggattaactaaaataactaggtctgaatggctatgagtatctatgaaacctggacatataactctaccttttgcatctataactttgtcagcttcttcgtttaaatcttgtgatatttttaatattttctcgttttctattaaaatatctccttcatatgctggtgttttatttccatctactataagcccatgttttattaaagttctcacaaaaccatctcctaattattttttataaactgattttaatataccataatatccttctgcacctttgaataattggtctaattctatatactcatctattgtatgagcaagattttccttagaaggaccaaatcctatagttcttattccagcctcacctgcgtagtgacttccattcgtacagaatgagtattgagttatttctgaatctattccagcttcttttaatccattatacgctgcttgaacaaattcatcttcttcatcatataaccaacctgggaagaatctttcactttctatagtatttcctgtatagcaatcagctttttcaactgcataagaaacttttgcatttaattctgggtcttctttcatcatttcatctaataaagcttgtattggagctaatacgccttctcttgtttctccaactaataatcttctatcaaaagtagctttgcaataatctggcactactgatgctcctggatatggagaagattttatatctgttaaaactaatattccatcacctaaaactggatgagttggaggtactaattgttgtatcttttggattacattagccattttataaactgcatttatacctttttctggattagcagagtgagctggtttaccaaaagtttctactactatttctcctctacctctttgacctatctttaagtttaattctgaagattcacctattacaacataatcaggttgaacagccttacttatctctctagctgaaacaccttcaaatatttcttcatgaacaacacctgctacatacaattcaccttcaaagtctttgttagtatcttctgcaaagtatgaaacagcagccatcatagcacttacttgccccttcatatcagaagttcctctaccatatattttcccatctactattctcgcttcaaaaggaggaacactccatttacttgcatctggaactggaactgtatctatatgcccgtcaaataatatttttttacctggtttatttccttttatacatcctactatatttccatatctatctcttgaccaactatcaaaacctagtaaagcaaaattttcttctatagcttttactacgttttcttcttgacctgaataactagcatttcttattaagtcttggcatacttcagttaattgtttttttcttgtttcatttaacattttgatattcccccatataatttttaatttgttgacgttttattttgatatttcacttttttaatttattagcatttcacttaatctattgattttttatttctttatattttatttattaaatttttatttagactttattttaattttatttggttttatttaattttatttagtttttattttgaatttttcatttgctttactttttcatttatttagatttttcatttgttttagtttttattttatttaaagttttcacttatttaagtttttattttccttaaatttttcatttatttgttaagtttttattttccttaagtcttttatttactttggcattcaccattccaaactatatctctatatttatcagggtcagtatctccttctgtacttattaataatactttagagttctcatctagtttcaaagcttctcttaagtcttttaaatcttcactttcaaggattgaaactaatgctccagttgtaactgctccagattctccagagattactttctcatctcctcttagagggtttcctaatattctcatacctttagcagatacccagtctggtgctgaaacgaatgctgatgaataattttttaacacttcaaaacctatagtgtttggttctccacaagcaagccctgccattatagttggcatatctcctccaacaaatcttggttttccatctccagcttctgctgatttatagtaacaatcagcctcatcagcctctactactactgttattgggcattcatcatatattgaagcaacatacccttgaactgcaccagcaagtgaaccaactcctgcttgaacaaatacgtgtgttggtctatctactccatattcttttaattgttctatagcttctttagccatagttccatatccttgcattatccatgctggtatttcttcatatccgtcccatgctgtatcttgaaccattactccatggtcatcagcttctgcataatcattagctaatcttactgcatcatcatagtttaagtctgttatactagcatctgcaccttctcctttgattttatttaatctaaattcagaagaaccttttggcattaatacaacagatttttgacctaatttattagctgtccaagcaactcctctaccatgatttccatctgtggctgtaaagaaagttatttctcctaatttttcttttatttcttttgaagttaatttgtcataccctaactcagatatatctgtatctaatctttgagctaagtatctacccatagagtaagaaccacctaaaactttaaatgcgtttaaaccaaatctataagattcgtctttaacatatattccgcttacgcctagtgattttgctaagttatctaatttaactaaaggagttttttcatattgtggaaagctctcatgaaaagctttagcctttgcaatttcttcatctcttaaaaactcaattcctttttctttttcctctgatttaggtaagttatttaatttccattttatttctctcatttattttatattcccctttcaaatttttcggtgtcattttaattttttatctttgtgtcttatagtgaagcaattactatgccaatattatttattctaaaaacaatttttttatgttggaattacatatatttataaaatttctttgaattttataaatattaaatgtgaaaaataagatttataaaagaaaaaattctcatattgggaaatttttatcaatacgagaattatcaattcgagaaatcgtttatttattttaattcttcctttattatgctcttattttttatatgtctattgttttgtcagatatattactacttttattttctataaatatatggctataaccttcttacgcataaactctataaatttatatactttatattctttattacccaaatattctttattacccaaagcctccaaaatggcttaaatcttttcatagcttcttacagaagtttacatgggcgtccctccaataagcaaaagtgcaatatgtgtaccattgtgtcctacttgcgactattgagctgtcgaaattcgcaacttcgcatttatctgatgaaatgcactatgcaaaatattcataacatccacaacagagttaaagttacctattcatattcactgtaaaaatttcttccacaggaaatgtaattttaaccaatcctattgagacaaactcaccacttatttttttgaactcacgcagtaatacatcacttgcccgaaaaaaagcctcactttcatcatctccagtaagtgctattgtgcaatggggtacccaacgattggggtggtaccattcccaaccatttgaatcaaaatcttgtagtacctcatataattctctctgaaactgatacatactgctattcattataggtgatacaaacaccgttttagtatcattaaacatgcctactgaaccaatgtaagcaggtattaccttatggttttgtgcaaacccctttagcttgtctatgcaacaagcctcatccacatcattgaaacaagccaaagtaagatgaggtcttgttttccattctaagtacttcgtactaattttttcatcagcgatttttttagataaatcaaaaagttgcttttccgtttttttatcataatatagctctatcgcatattgcataataacacctccaccataaagtaaaaatacctatctataaaaacacacaaatacctatcattttaatattatattactactgttcctcttccaattttctatatagtgtagccaaacctatacctaaatcctttgctatcttcttcttcgtctttgtatctcttccatacttattcaacaacttgtttatgtaagtcaactctaattctttaattgaaagtatcctttcctgattctctactatccctccaactatgtcatcttcaaatattatatttatatccttatttttacaaacatttccattaatattataataatttaaaatatccaatggaagcatatctttatatattattccatcatctccaaccaaattcatcatatattcaactgcattttccagttcccttatatttcccggccaattatagttaatcaacatattcattacattttcttctattttatttaactgaatacctaattctaaagaatatttagaagcaaacttcatcattattgcctcaatatcatcctttctttccctaagaggtggcaaatttataggaattacatttaatctatagtataaatcatccctaaacttaccttcatttactaatttcaataagtttttatttgtagcagcaatcactcttatatctaaatctataagtttatttgacccaattctcgcaaattttctctcttgtaaaactctaagtaactttgcttgtaaaggcattgacaaatctcctatttcatcaagaaatataacaccttcatttgcaagttcaaatttacctactttacctccactactagctccactaaatgcaccttttatatagccaaatagctcactttcaaggagattttctggaatagcagcacagtttatcgcaataaatggcttgttccatctgctaccttcagcatgtatagccctagcaattagctctttacccgtaccactttccccagttataagtacagttgaatttgactttgctaatttcttagttctctcttttacttttaacattgcctctgaatttccaattatagactctatatcactatttccccagccactattgacttttccatgtcctttatgattgatatatgtcttgtcaaatattattattttgtcgtattgatttatatatggatataccggaattattttggcatttatattataaattttgttatcaatatcaatttctagtaattcatgtccatttgaggaagattcaacagatactatatttactatattttctattatatttttatatatatctaatttttttagagctatattgtttatataagatattttgctatttatgtctagtattataacgcctttttcaacattttcaatgatttctatcatcatatccatttttctactgctattttttgacgcttcatgttcttctattttcatagaaattaaatcgcatatatgattgacaaattttaaataattatctatttttgcacttatttctacttttttagttttatctgtactaatagcaccaattactcctatagttcgattattatactttattggaactgctattattactttatttaggcatttcatgtaatgggaacattctatacaaagctgattatcacatatatccaatacgactaattcctgacctgtctgtataacattgtcgtaaataaatccttctgtaacaacgctttcatttatctttgatttatacagacctgtaccactaattcttattaatctatcatcaactatttcaatatctacatctaacacactagctactgtttcagtgtattttatcatttcttgttgaaattcttttaatttacttaacatagtttcccccattagaatttaatttaccaaattatcagtttagctatattttaacatatagtcactctttaaaatatatataaaacattacttatttatatatttacattaaaacacacaatattaatttataaaaagtttgttttatatgatgaccttaattacttaattataagatacagacaataaagtaaatcacaatacaataataaaataaaaaaagctttcctcatataacaaatatatttttgacataaaaatatacattatatgagaaaagctcaatagttaaatatttagatagatttttatatagacttttttaatataaacttttttaattgtagactttttttattagtttttaatttttattagttttgttattggttttattgttataatacttataatactgccattgcttcaatttctaaaactgcatcttttggtaattgagcaacttgtacgcatgaccttgctggtggattttctttaaaatatgtagcatatacttcattaatatcattaaaatcctttaaatcttttacgaatactgtagtcttaaatattttatccatacttgtaccagcttgttctaatattgcttttacattatctaaagaagcttttgttgcttcttttgggtcagatactaactcgccagtcttcatatctattggaagttgacctgatgtagaaactatgtttccaacttgaattgcttgagaatatggtccaattgctcctggagctttctctgtagctattactacttttgacatgacttcacctcctattattaagttatatttacaggaaaataaaatttcctaaacaccaatattaatacgaacctttagattaaatttcaaatctaaaacttcaaataatcaatacttagatgattatgtttatttgtgtcttgttaacttttattaaagcaattaacgtgccaaactttatttatatataaaattttgtgaagtcattcaaaatagttacttctgaattttttcgtaaaaaaatgctttaaaattacttttttatgatgtcaatttttttctcatatctagaaatttaccaacatgagaattcttgttttgagaatttacagattaaagttatttttcaatcttaaattatcaagttattacatatgaaagaactatagttgacaatcccactattataaataataaaacctttacccataccttatttaccctagttatcatagagcctattgaaaatataacagctaaatataataataaccaaaaaattatcaatatctaccactgttgctgaaaatccaaaaaactaccttttgatagtattacttaacaatctaattaatctcataataaatttacaacttataaataaattgttatattggccgtatctcaacaactttctcctttcctagttttaaatcttttatagaattgtaccacgtctaagtaaattttcatactattaagtcttatttctaataaatcattagctctcattctatgcccaataatgtaagattgtagtaattttattgattttaatagttttatttaatatacttatattaattattttcatgtgaaattattacttatatagggggatttttttaatatgagcaaaagtgaattaacggcagaaacaacagaagaaatgttagaagtactaagtggtaaagattatgatattgcatgtcatttacatgaacttggtaaatcattagattgtaaaattgaaccaaaaacaggtgctcgttcttacaaaatagtatattcaactaagaaaccaaaacgtagcttatttactattgaatgtaatgaaaaaaaatggagagttaaagcaaatctttttcatctaaatacatataaagatgctgtggaggaatgctctaaaactattaaagatagtataactaaaactcgtacttgtaagaaatgtaattcaaagtgtattggaggttcttcgtttgatttagatggaaagtcttatctgacttgcataggaagtggtcattattttgcaaatatggaagaaatggattggaaaaacctagaaaaattaattactaaagaaaataatattatgcaggaatctgtatagttttttaagggtaattattaaaatatatgagtaacaacagatacttaaataggcataaaaaaataaagggtataataaggatatagaataaaaataaatgatatagcacaaagaggctgtctcaaaatatagataagcctctttttattgttgaaatgataagaatatattcgattttatacaattttatacaaacatactaagccaacttacccatttcatatgcctgtttcattgccttacttcccttaatatcacctacattccaagcacctacaccatatactatacctttttctttagaaccatttagacatgatgtaaatcctctaaatccttctattgttctttccatatcagccacattttcatctgctgctgcaacgataaaatagaaatctttatcacaaatttcagtatatctagagcaagttctatcaatcatagttttcatttgcgcattcatagtataaaaataaacgggagtcgctaaaacaatcacatctgccccaatcattttttcaagaatttctcccatgtcatctgtctgtgaacaacttgcttctttttcataacaagcaccacatccagtacaatagttaatatctttatcttttaaaaatatcttctccacttgatttttagattctaataccccttgtataaactggtcacacaataagtcagaatttccaccttttctaggactagctgatactattaatacatttttactcataagatactgcctccattttcttatttctactgctctttaatactttttctttctcaataataccttcttcatatctatcaatcttaaaatttaatcgttccaaagttttttgcatttcttctattctttttgctagttggtttctctgctctattaaaagttcttttctagctttgatagtactgctcccttgttgaaacatagctacatactcaattaatgtctcaatagaaagacctgcacctctcatacactttatgaaattaacccactcacaatcttcttctgtaaaagacctaattccacttttatttctatttacaggtggtattaaaccaattcgttcataatatcgtaaagtatccgctgaaagctcgtattttttactaacttctgaaatcgtcatacatatcttctcctcttgatattgtatagattgaattatttctcaaaggtttctgctacattctttaaagcatctataattttaatgtgttgaggacagctttcttcacattgtttacattcaatacaatctgaggcctttccataagttttagtataattattatagtaaaccatctgtgttgaaaatccagtattaagagcttgtttttctgcattgtacagcgcaaaatagtttggaatagcgatattttttggacagccttctacacaatactgacaggcagtacaaggaactaaaattgattcgttgataatctctactgcttcatctataatattatattcctcttgtacgaatggtttgaaattttgcatatatcctgtattgtctaataattgttccatatttgacatcccacttaagaccatcataacattatctttacttgctgcaaaacgtattgcccaagatgaaattgacatatctggattgtagtcattcaataatttctctgctttttctggtatctttgcaagtgtacctccttttactggctccataacaattacaggcttattatgcttctctgccacctcgtagcattttctagattgtatgctttcattatcccaatctaaataattaatctgtaattgcacgaagtctacttctggatgctcactcaagactttatccaatagttctgcactatcatgaaaagaaaaaccaatattctttatttttccttcttttttcttttcttcaataaacttaaagctatcaaattttttagctacttcataatgtgacacgcctatattgtgtaaaagatagtagtcaaaatagtctacaccacatttttctaattgctcattaaaaatggtttcttgctcttcttttttctttaaagccattaatggaagttttgtagctatagtaaaactctctcttttgtgtctttttactagagattctctaagtgctatctcactttttcccatgtgatacacataggctgtatcaaaatatgtaaatcccctttctaaaaaagtgtctaccattttatttaaatgttccatatcaatagttgtaacatcattttcatcttttattggtaaacgcattaatccaaatcctaatttttttgcctccattgttttacttccccctttaaaacttgtttgttttttctctctactttaactattcttacaagtatataattcttgtataattatactttactacttggagttaacttcaagtcaatagatttttttatttttaagacaaatattataaaaatacagttctttaatattaatccattgcatgtttctttcaccctccaattctcaaacttcacaaactccaacatgcaaagaaatatatactttaagaaattcagtccattaatattactacaaatactttttagatatgtttaaaaagaaatttcacctaaaatatttataaaagatttagaaataggtcttgtgtctattttaaaatatataaaacagtggtaaagacttatttataagataaaaaatgaatagtgtataccctttttaaaaagttttttcctttttatatttgtgatacaatgttaaatataaaaaggaaaattttgtattaaagaaatcttatttgttgattttgtaacttcaaactcagtatcaatttgattttaagattatattttattaagtatgctaaataacaaatttttaaagattgtgaggtaaaaatatgaataataaaaatttagctatattaatatcaggtatgatgtttttttctagttcttcagcaatttttgcagacaatactacaaagcaagaaagattaataggtaaaacaagatatgaaacagcagtagaagtaagtaaattgggatgggttcaatcaaaaacagccattatagttaatggtaattctattcaaagtgcgctttgtgcaaatccatttgctaagctaaagaatgcacctatacttttagtaaacaacaacagtattgaaaattcaactaaggctgagcttaaaaggcttggtgtagataatgtgtacattgtagatagtggaaatagcatttcttctaaagtagaaaatgaaataaaatcacttaacataaaaataaataaaatagtaggaaacaatatatataaaatgtctacaaatgtacttaaagaaatagataagataaaaaaggtagaaaatgttgcagttgtaaatggactaaagggattatctgatgcagttagtatagcttctccagcagcaatacataatatgcctataatattagtatcagatgaaaacagcaatgatagtagtataaatttcttaaacaataggtctataaaaaaatcttacatagttggaggaaataagattttatcagacaatacagtaaagaaatatccaaacagagaaagaatcagtggttcagatagaaacaatactaatgcaaaaattattgataaattttataaagataaaaaaataaataatgtatttgtagctaaagatggtattaaccaagaaaatgcattagtagattcattatcaataggagtattagctgctaaagaaaattctcctataatgatatctaatggtagccttgtaaatagtcaaaaggaatttattaaaaataaagatatagatgaaataacacaagtaggaggaggatataatcaaaaagcatttgaagatattttaaaactaaaaaatgtgaacataagaaataaaactaaaaaaatatctttaatacaggctaaagaaatattaaaacaagctcttccaggaagcgatattttagtttgttattatgatgaagatgataatgaatatgactgcaaagttataaaggataatatcctatatgagatagaaattgatgcctactctggtaaaataatagaaattgaaaaagatgatgacttaaatgataataatttaggtacacaaaatatatcattggataaagctaagtctatagcattagatgctgttcctaatggtaatttaatctattgtaaatatgatgctgaagataacgaatatgaggctaaagtaataaaaaataagaaaacatatgaattagagataagtgcatttgatggaagaattgtagatattgacatggacaatgattctgatgatgactttgatgataatgataagaataactctaatactaatgacaacagttctattattagtgctgaaaaagctaaatcaataatgctagataaagtgcctggtgggaaaatagtaaaatttaagtatgatgaagatgacaaagaatatgaaggtgaaataataaaaggaaaaattgaatatgagataacaattaatgcaattactggtaaaatattagaatttgaaatagatgattaataaaaaatatatattctattaattattacaagcaataaagccataaatattgaatttttcaatatttatggctttattttattttttttaatttaaatctacattatgccattatatatctatgcactcttttaaattaaaatcttgtccatcatcccaaacctaataaagttagattttaaacaatatattgtgatataagtaatttgtgtagaattattgcgtgatttactcatgaagaaacaataaggttaatatataatttgactatattaagacgaaaggagacatatacaatgaatacaatattaaaagtaaataacataactaaaacttataataaagggcaacagccgagtttagataaggtatcctttaatgtatcagaaggtgaatttataggtataatgggagcttctggctctgggaaaacaactctgcttaatgtattatctacaattgataaaccaacaagtggagatattttcataaataatataaatttgaaatcgcttaatgacacttgtgctgctgattttcgtaaggataatttaggctttatctttcaagagtattttttactagatagtcttacaattttcgagaatatttcagtacctcttacacttcagaaactcaatccagataaaatagaaaacatggtaaagagtctagctgaacgatttgacatagcttctcaattaaataaatacccaaatgaattatctggtgggcaaaggcagagagcttcagcagttagagcaatagtaaaacatcctagtattctctttgcagatgaaccaacaggagctttggattctaattcagctactgaactactccactcactacaggaagcaaatgaggagttgaaaacaacaattttaatggtaacacatgatgcctatgcagcaagttttgcaaatagaattttgatttttaaagatggtcatatcattaaagaattaaataaacaaccgaataatagacatacattttatgagttgattattcaagaaattgcaaaattggatactaaaagataggaggataatttaatgaacattttttatatggcaataaagaatcttaaaaaaaacttttcattctattctctatatctactttcagtctcttttgttattactgtatttttcgcatttacttcattctctgttaataagataatgctagaaaaaatttcaactgatggtagagttgaatctatgtgtaatgttatttcgatatttttgatggcatttgtcatcttctatatggcatactcaaatcgattcttcttgagacgtcgtacaaaagaattaggcatatatgctttacttggctatcgtaagtttacaatattatcgctacttacctttgaaaatgtattaatttgtagtggagcttttattactggattggtattaggagcattgtcacataagggtattgtctttggaattacagcactacttaatttatcaattgataattcacagataccattttttaatataaatgcaataaacaaaacaattatctttatagcattagttgttttagtcttagctatatcaaatggtaaatttctttataagacttcacttgtaaaattgataagacatgaaaaaagtgcagaaaaaaaattaaagttcagaaaaattccagcctttatgggatttattatgattttaagtgggtattgtttatcactagatattcttcgtggagctaaatcagtatgggtaagtattggattttatcaaatgggcttgataactatgattatcattgtaattggtacagttctctttatcaattcctttcttccatatattatgcaaaagagtaaaaaaaataaacgtactttctacacagatatgaagataatagctattccaaactttatctatcgtatacgttcaaactctaaaactctaattatgcttacattactctctgctactactttgacagtttcaagtgttatggcactgtccttatactaccctattgcatctgtttcgcgtattgcaccttcagagatagaatttagagtagaaaaaaataaacaaatagaagatgtaaaacaaattgtcagtcaatatacgtctaatacagatgatattatttttacacagacaaatatttataaggtaaaatcttcatcaaaagaccttccatttgaatatgaaattggtacatctaagaataatttatctaatagtagttcttctaaagaagttatttcaagagaatcaggatttgaatgtatatctttttctgattattatactttattaaaggcacaaaatcgaacaaagctactaaaacaacttacccctttaagggataatgaatgtattttaatgaaatatcaaccaaataatgatggatatagtgaaaatggaacgatttatccattacttattaatggtaaagaaacacctgtagctgtaagggaaacatcattaaacaatgctatttcttttgccaatagcgttggaacacttatcgttaatgatagtatatatgagcaaatagcacaaaataaattaccaatgacaagcattttaagtattaatggtaaatcaattaaaaataatgaaaatttatatagtaatatttcagattatttagatggaagcccttatttacaaggatattctcacaggataaatgatttattatcaattaatagttctacatttctgttaatcggatttcttgtggtattattctttattgctgttggaagtattttatactttaacaatatatcagcaatttcagattcaacatctgattataagattttacagaaaatgggttatgataatatacaaattaaaaaaattattaaaaaacaagtattgccattttttaatattccgtttttacttggtatattggactgtatatttgctaccttggtttataagactgctttgatgcagaatttacttggaaattcattttcacaatacatacctgtgattattgcaattttcttaacttctgtagtgtatttgatatattatatacttactattaaatcctgttgtaaaattgtattaaaaaattaatatttaccaaatcgtcaagcttagaggtgtgacgatttggtatacttcatttataagtatttgatataatttaaaattatagattcttaggtttgatttagtcataaaattaatataattaactcataaggaggtgtataagattgacaaattttaatttaaaaatactatttttaggaaactacattctatcacttctcttcatgggaatatctacaagcactgaaacttatatgaatatccaaagcattattcccttaataatttcaacattattactcatagacatcacatatataacctcttgtaatgtccgagaaaataacattatttcattattttgtggattactagcactagacagttggtatttactcttatcatttgtaaccacaccaataggcactattatttttaaaatattaagcacagttatagtgtatgtctctattaaatttatatttttatttttgtttcaaggtagtggatacaatttccgtaagataacagatattttattgcttatcacctgcattggtgcaattgtaggagcatttatttctaacagaacgtatgcttgtatgtacggaatacagtttgttgttagtataataagctttttatatattattttttatcatttgaaaagggttgtttttgtcataaaaagcgaaaaaaagcctatatcgatttcagtatttataacaattataggattccttacttattatttttttacactaagaatatcaaatcatattggtaattttggaatctatctaactgtattggtattttttatgagtattcatggtattgcacttaaagaaaatgatagttttcctatttcaacagtttttaacataaaacaaagggctatatttctttttataagtattttagtaattagcttggtcgtactatttgccaatgggaatttttctataatattaatagctataaatgttttatttatgcttattttcctctgtaacattattttggagtttaaccttagagatgaaaaaaataaagtagttaaaaatagcaagtatacttttgcattagaaaaattacaacaagaagaacaactaaaaacagagttttctaattttttacatgatgacatattacagaacctgctttcaataaaaaacatgatgagtaagtcatatcgcccagaagttcaagatattatatatgaaacacttaacaatctaaatacatgtataagaaatcaaatgcaagactatcatcctgttattttaaaaaatttaacagtaaaagaaaattatcagaatttaattgaaagtgtttcttcatcctttccacaaaaaaacatttgtgtttcatttaagtgttctgatactttattcttagttgaaccatatgatatattgatatatcgactgattaaagaattattgacaaacgtgtataaacattcaaatggtagccatgcatggatagctttagcactagaaaaaaatataataaaattaaatattaatgataatggtgtgaaaaatacatcttttaaaacacctttagatataactaaaattacttttgatataataaaacacaaagggattatatcaattaaagaacaagtagaaaatctaggaggaacgataagtatttctgataatatacctcatggagtttgtgtacagattacaatccctatgaaaggagatggttcttataaatattttgttagttgatgaccatatgctttttgctaaaagcttgtcaattgcactagaagaatacgaagaaatcgaacagttttattccacacaggacatccataatctttcagaaatgattcaagataaaaaaatagacattgtcttaatggatataaaccttagaggcttaagtgaatgtgatggcttaaaagtagcttataatttattagagactaattcaactattaaaataataatcttgactggatacgacctcccagtttataaacatgaggctaaaaaaataggtatctatggattcctaaataagaatattagccctgatagtttaattgattcattattaaaagtctatcaaggggtaacctgttttccatctgaaaatactgaagtaattattgaagatttaactaatatggagaaaagaattttacagcttatctgtagtggtaaaaaaagaaaaataattgctgatgaattgtatataagtgaaagaacattatcaaatcatttacaacacatatatgacaagctagatgtttcatcatcagttgaggctattacaaaagccattaaaatgggttatatttctccagtatattaaaaaagtgagtgtctcaaaatgaactttctagctcataaggcactctcctttgtattaaatcaaatatattttcatcatttaaacaattaagaagaggcttctctctattttgagacaactccattttaatacactatttatatttatatataaacatattttaaacaactaaaaagcaactaatatctcaatacatatcttcataacacatatcaccataattacaagcagataaagaactctcctcatttaaatacgactcaaattcatacccaaacagaattgttggttctatatatatttccatatctgtatatctccatcttcttacctttgcctctataaccttgtaaaaatcttctaaactatacccttcttttaatcttttatctataagtgccttagttatactcaaatcagctttaaaattttttcctgattcactatttaattttcttataataatttcatgtatgctttctggatttttataagtagaatcttcagtcaaatcttcatccaaattttcaaaggtatttttatttaaattctttttatttaaattattttttaataattcttttttctttgtctcattttctgtttcatacccagtatgaattatcaaatcataatctttgtctatactctcttgatttatacggctgtatgtgttggtattactgttcttgaacaactcatctctatgtttatatttcattgttttttggttattgttaatagttgcatcaatgtatttctctatatttttgaaaatatcactattctttgttacaatttctgcattactattttcagaacaaacataactatatacagaacaacaatttccctttactcccctacttattaatctcaatatacctaaatctataaattcatttacaagtctacttattgtagatatagatacatcaaggtcagatgcagctttccttactgtcatcataaattgtcctcttggcagagttccttttaatctttgtatattttcttttctcattacatagtgattaaaccttattctatttacatctcttttttcattaaaatataatactgctgaatttaattgataaaaactattactcatattcccactcctccaatttaaatagataatttgttgtaaagtttttagatttttaaataacttattaaatgattatttttattaaaaagtattctttgatattttcattttaaagttttaagtataataagttaatagtgtagatttaacttttttatttaaacaataaacttaatattatttttaatataataattttattaaatttagtatgtaattttttaatcttattttattccctctatactcttatgctaaataataactttgataatatttccctaacttatgtttcaactggtttatattgcaatttatttaattacagcttatttgcataataattcgtccatatcataagttgtgtatttatataaatacacaattaaaaataaatcactatggtatactaattattacgaagactatacttatatgcaaaaataaatataaggcatcttatatcttttattaattataaatatcttttatcaattataaaaaattaaacgctatcttatttatcataaattgcaaaaacataaaattttattactatattgctataaattaattaatacacattttacacaataaggagggctatatatgacaaatgctaaaagtaaaaaagaatatctaaatcgtatttgcaaagtgcaagactatatagaagaacatttacatgaacctctttctcttgatgaactttctaatatagcaggtttttcaaaatttcattttcatagaatcttcaaagcaatagaaaaagaaactttggcacaatatgtaaataggctaaaactagaaaatgcaactgcttttcttattcatcgaactgacatgactgttactgatattgcacactacttcggctttactgattcagcagttttctcgagagcatttaaaaattactataaaataagccctataaaatatagaaacaattatagcaagaattgcaaagaaccatataaaatttctcagtacaatagaagcatatcaaaacctaaatgtaagaatactagagaggttaaaggtgaaattgaaattctagaacttgataatatgaatactatttacactagatatactggttcatatggtaatctaaccagtactttcccaaaacttttagaacggttattcacatatgcaagtgagcagaatctacttggacttgaaaacacacaaatattagccatttatcatgataatccacaatttacacaggagcatcaattaaggactagtatttgcatgaccattccagataacattgttgtcaaagagaatgacaatcttggcaatatgataatcccttctggaaaatatcttgtgggacattttgatatttcaaaatctgaatatagtgatgcgtgggattttatgtataatgaatggctatcaaatggtaattataagctacgtgcctccttcccttttgaagtatatcttaacaacccacacaatcaccctcaaaatagacactttgtcgatatatatttacctatagaacctttttaataacctcacctaatctattcttgtattaaggattaatatatccctattttacggtttgataaaattgataaaatgaggtgaaccaatgaaagaaataaaaattaatggagcaaagatacacaatcttaaaaatatagatgtttctatccccaaagataagcttgttgttgcaacaggtgtcagtggctcaggtaagtctagccttatgtttgacattgtatttgaggaaggtcgtaaacaatatctgcaatctttaggtatacttgcaggtattgatagtgaggataagtttgataatattcaaggtttagctcccactatagctgttcaacaaaatattattcgccagagcaatcctcgttcaacagtaggcacaagaaccaatattctcaacatgcttgcactattgtattcagtagaaggtcaaataatgtgtactatgtgtgatactcctgtaagcgataatctaatttgcaataattgtgggtatgaggaagaacgattaagaccaagttatttctcatacaactcttcagatggaatgtgtatgaagtgctctggacatggtgcatattttgagattaatattgaaaaattagtccttgataagcatgataccctaaaacaagtcttagatagagcaaagattacaccaggatatttgagagtattttctaaaaaattcaacgattatttagacatacaattcttacaactacctgaagaaataagaaatgaagtactctatggtcattatgaaaatggtaaaaaaagttcctctttatcaaaggtatttcacaatcgttacaaaaggggtgaggatttaaatggagtttatactatgactgcctgttcagattgcaatggttttaaaattggtgaagaagcacgtagagtacttttaaacggaaaacatattggagaacttggaaaaatgacgattttagaaattgatgatttccttaaaatcttaataaaccaaggtaatttaaacacatttggtacaaatcttgtaaatgatattttatccaaaactcgacatttaatagaatcacgattaggtcatctatccttataccgagaaatgtcaactttgagtggtggggaaatgcaaagactatttttaaattcacatctcgattcagagatggactcattaatttatgtgcttgatgaaccaacagctggattgcatgaatcagaaaaaatagacatcttaaaatcaataaagaaacttaaagatttaggcaatacggtcatagtagttgagcacgataaaaacacaattgaaatggcagaacatattattgatattggtccaaaagctggtgttgaaggtggtcaattagtatatcaaggagatttagaaggtctacttcaatccgacaaatcacttactgggcagtatctatctggaaaatatccaatgcctaatagaacaagcaataaaaatattacacatactgataaaataccttgtataactattcaaaatgcaaatacaaataatcttaaaaatgtaactgtatcattacctttgggtgctatggttggaatatctggaaaatcaggtagtggcaagagttcacttatatcagacaccctacttcctcttcttagaagccaatttaataaccatactatcaataatcaaataaattcttcagatagcgaaataggtgatgaagacgattatgcagttattgaaactattgcagatagactgattggtactaaacatatttctggatattcagagatatctcaatctcctattggcaaaaatatgaactcaactcctgcttcttatattggtatatgggataagatacgtacactatttgcaggtcagccagaatcgttagaacgaggatttacagctggtcatttctcatttaactccaaaggtgcttgtcctaaatgtagtggtagtggatatgaaaaggtctggttaggaaataatctaagtatagaccatatatgcagtgaatgtcagggaaaaagatttaatgatgaatctttatctattaaatataaaaataaaaatatacatgatattttaaatatgagtgtttctgaatctgtacatttcttcaaggatattccaaatattgtttcacacttaaatgtattagaacaaataggtatggggtatataaaattaggccaacctacaccgactttaagtggtggtgaatcccaaagaatcaaacttgcaaaagaaattggtaaaaaacgaaatggtaatatcctttatgtattggatgagccaactactggtctaagtctatatgatacttctaagttgattcaattattagatgaattggtggaaaatggaaattctgtaattgttgttgaacatgatatagatgtattaaatgtttgtgactggattgttgagcttggtccagaaggtggtgacaaaggaggttatataattgcagaaggttctccaaaaactctaaaagaaaatccaaaatctataacagggaggtatctttaatgaataaaaacaattgcttagatttaatatttgaaaaagtagacccttcaagtgttggcatgagttcagaaaagctctcacaactggaacctttaataatctcacaatatagtaatataaatggaataattattgcaagaaaaggaaaagttgtctttgaaaagtactataatggatataatgctgatgatacttttcatgttgcatcagttacaaaaagtattatatcagccttaataggtattgcaatagataaaggatatataaaagatgttgaccaaaaggttgttgattttttccctgaatatacttgtagtccttctgaaatatgtaaaaaagcagtaactatacgtcacctacttacaatgactgcaccatacccttttaaaaatatgactgagtctttagaaagactttgcaaacaaaaagattggataaaatataccttgaatcaacttggtcaaaaaggcgaaattggtactttcaaatattcttcagctggaacgcacctactttcagctattataacaaaaactactggaaaatctgctcgtgaatttgctaatgagtacttatttaaacctattggtatgaaagttataccagattatgatatgaaagattttggttttgaagatttctttggaaaaaatcttaagggttgggcaaaagatagacagggttattctataggtggctggggacttacattgagtgctagagatatgttgcgatttggttttctgtatttaaatgatggtatttggaataataaacgtattatatctaaatcgtggattgaagaatcggttaaaatgaatagtaatgaatacggttatctgtggtggatatgtaaaaaagatggtgttttgtggtattcagcaatgggaactggaggaaatgctatttgttgtattccacaatatgacttagtaatagccataccatctaaaatagtgtttaaacctcgtgatagatgggagtttattgaaaaatatatacttacttctataatagattaatcactcttagataaactaattactcttagataaccaaaccctccactataacaccagacttttgtttggtgttattatgactaatactatatatctaaaaggagttgaatactaatggacacttacacgacatcagaggtagcagatttaattggtgtacatcctaatacagtacgtttatatgaagaactaaacttaatacctaaacctaagcgtaataccaatggttatcgtatctttaatgattttcatatagaacaatttagatttgctcgtacagccttgaaaattgaagtggtacaaaggggattaagaaaagatgcccttgagattgtaagaacatcagcgaatagggactttgataaggctattagtcttgtaaatcaatacttgcaacaattagaaatagaaaaatctaatgccgaggaagcacttactattgttgcacagattttaaatggaaatactccagaaacaaataaactctttttaactagaaaagaaactgcagaacacttaaatgttacaatagatactttaagaaattgggaaatgaatggtttgttaaaagtaaaaagaaaacaaaatggttatcgtgtatatactgatgaagatataaaacgacttaaaattataagcgcacttcgttgtgcaaactattctctttcagctattttacgaatgttaaatgctttatcttctaatcctaatactaatattaaaactgtccttgacactccaaaagatgatgacgaaattatctcagtgtgtgacaaactgataacttcattgaaagaagctgaacataatgcaaaaaccatgaaatctcatcttcaaattatgaaaaaacaattttcctagccctccactctaactccagactttgatttgtgtgttatccttaagagcaagaaaaattcaacacacaaatcaaaggaggaataggatggaaaacaaaaatactaattctacatggaagaaaaaagtcattctttttttagcaagtcaatatatttccttatttggctcatcacttgtacaaatggcaatgatatggtatgtcacacttcagacatcatcaggtgtatgggtaacagttttaactgtatgctcctttatacctcaaatgataatttctttttttgctggtgtatgggcagactactacaatcgaaaggtactcataattgtatcagattcaacaattgctatatctacattagttctaattctatttatgatgtcatcaaatggcacaacaagtgaattaatagccatatcagtaatatctgttatacgttcactaggaagtggtgtacaaacacctgctgtaaacgcaatgattcctcaacttgtaccagaagaacatttaatgcgttttaatggtataaatagtagtctacagtctatagtacaatttatagtgcctattgtagctgctgcaatacttggatttggtaataaaataaatcaagttcttttaattgatgtatttactgcaattattgctattgtattattgatattcatcaaaattcctaaacataatataccaaaacaaactgaaaaagtctcattttttgcagatatggtatcagggataaagtactgtttttcagataagttcattagaaaagtgcttttcacttatggagcattcatgcttctttgtgttccatcaggatttcttataggacttcttattgaacgaacatttggcaagggttatatatacctgtctattattgaaatgattggatttttagttatggttttaggtggattgattataggagtttttggtggttttaaaaatagaaataagaccttttttctagcaatattatcctatgctattttttcaattattctaggtcttgtaacacaagcttggcaattttttatatttatgttttttacgaatttttcaattccaattattcaagcatcagctatgactatgttgcaagagcatgtagcaccacaaatgctaggtcgagttcttagcttacctattattatatatactggttttattcctcttggtatgatgattttcggaccaatggcagatgtaatttctattaataatttaataatcgtagcagggattatacttttattttttgctttggctatcccctattcaaaacaattttacaagcaaggaatatctaagtcaaatgaatccgagtaatatatttaaatagtttaactcgatttatctggttaaaaatgagggggcttaaaatggactttttaatttatgaagaaaattttttatatgaaatcaaatatattttatcatttcaacattgaaaaataggtttatctttattttgagtccctctctttatagcaaataatattttgatactatctttattaactttatataataatacctcatataataatacctccatttatatcataaattaaatttatagtacaaatggaggaaaataaagtatttatatagtttaagtacctattaagttttccactaagtagctctaattgtactgaatttcttactaaattatattgaataattataaaataaaactaactattacactacataaattaaagtatacaaattgcactacataaattacactatacaaagtatattaaatcacctattaaattgtcccaattataattatactgagttatctactaaaagataactttctttttttatctaaaataatatatatcataaaccatactacacaatgtacaaccaaaattacaatatcttttataataataacattaccattaataatctccataataccattaaatgtagcaactgatggcattatatagcataaattccctataccgctggtattaacccctagaagatatattaacaaaggagcacctataaataaaatcattactattttaatataaacaattcctaccataagaccttctgacaactttccaataaataaacctataagtgatgaaataaatgctgaaaatacaacgagtaacaacatcattatcatatctaatattgaaatatccaaacatataaatacagttatcattgaagataaacacccacataaaagacccaaaaatactttttgtataatatactgacttctactctgtggcaaaacttcatttataaatgatattccatcttctttttcagatataatattcattgcattaaaggtacatcccataaacatagcagtaattaaaatcatagcaataaaaacattctgaaactcttttaaaatactatctttaggcaatattgtaacctcaacatcttttaaatcaccctttagtctaaacatctctggcaatgtctttccaacattttttatagcattaatctcatttccataaagcatagtttttattcctttaccatctctaacaactccaattgtgtccgttttaatatccttaatttcacgtattaaatgcatttttgtgtcatatacacttaccataccatacttcttcaaccactgctctgtttgtacaggaagtgtatccttcactataccaaaacgtatctctcctaatgaagatatatcaattgttcccataaaatttattaaaatcgccataacaactggtaaaaagaaggaaattatacacattttatctttttttatactctttaactggtaacgtaatcctatcaagattatccctccctaaccaactctttattaaaaatatattttacaagtaaaaatagaactattattgtcaaagaacacactacaaaataaactaattcttttgaaaaattcatgaaaaacgcatttttaagctgactataaacatgatagaagggatgatatttaatccaatctatttcaaaagatgtatttgcagatagaaatataggtgtagttatgaatacagcaaccacaagatatataagagaaaattgcttaaaatctctcaataacattgagcatcctattccaatcaaagacataataattgataaaatactagcttgaactaatacttgtggaagtatttttactccttcaaaaaatccaatattaaatactactaaaagaactgtaaaacataggtcacatatcaaaaaagcaaatatctttgataatataaaaagacttctttttacaggtaaaataccagtaatacgcattactcccatctgcttttctttaaataataaagaggcaatccctaaaaatccaatagctacaatttcaaagaataaaatctcacaagtcatgtcttttctttgttttatctcagatgtatccttatcattaatttgaattattgcattgttgtctgatattttgctattatggtctttttctgatgataataatgacaatgcatagtcagctctataattgtcaactcctttaatactttcatgtaaaattactttcggcttactggaactcatatcaatacaaactgcacttgtatcttcatcaagttttgcttttaattcacctatagaagaaacttgattaattaatggagatgcactcatgcttatattctctggattatatagatatacattattgtgataactatcttcatccataaactttacataaccaaaattaatataacacgaataaagtatgagagagccaagtgtcagcacaaaaaatttaccataaatcatcatccaaaaatctttttttactaaggtaaaaaatttagaatacattacactaacatccttcctgtgtatttaataaaaacttcttctagtgtaggttcttttgaatgtacacttaagatttcatcatatttaaaagttattccagattctaactcttgtatatctacaatttcaatatctcgatttccattatatacaaattccacttcaactttattattgctatttttcatttttaaatttttgggtttatctattaccataatcttgccatctgcaataaaagccacattgttacacattaaatctgcatctagcatattatgagtagtcaaaaagatagttgttcctttttttcgttcttcttcaataatcttacgaaatagtacagctccagatgggtcaagtccactagtaggctcatctaaaaataacaactttggattacttaccaatgctcttgccatgctaatacgttgcttcataccttttgagtaggatgatacaggcttatttataaactctttcttaaactctaacaaatctaagagttcatatatgtctctcctttgatttttaggataaaaagacgaaaaatattctaaattatcaattgcacttaaattggtatataaataaggaaattcaaataaaacaccaatcttttgatatagagactctgtatatgctttaacttccttcccaaaaagggatacgtgcccattgtaaccttttaaaacgccatttaagattttctgtgttgtggattttcctgaaccattaggtccaaggaatccaaagatttctccttcttttacttcaaaattaagtccatgcaatatctgtttatcttttccataagaaaattttaactctcctacttttatcatctatcataacctcctttatcatttttttgtcgtctatcccaccattttataaatttaattttaagcggaatagaaagcaatattatcaatataatagtcaaccatgtataccatttcataagtactcccccttgtaaccttatttaattacgcttctattttttaatttatttaacctattttatttctatttggtgaaatcagagtgtctctcttgtgaaatcgaagtgaaataataaaaagcttaataaaaaatcttgttttcatcaggaaaacaagacttttcattaaactttttattagactttttcattaagttttttattttattctctttaaatacttacgtatacaaagaaaaatattttacatcagatacttataatttataaattaatactaaattattcatcaattggaatcataaaataaaactctactcctctatcacgattattcactccatattctaacccttgcattgtaagtatttgtgaaacaattgcaagccctagacctgaacctcctttacgctgagattgaacactacgataaaacttagaccaaatctttgaaatctcatcttgctctataatcctaccatcattataaatttcaaataaaagcaagccattttcacatgtaatcgataaatctaaattaccattatatacaacatgcttctttgcattaataattagattctctactacttgttccattctcattttatctgccactacaaaaacttcatactctggcaaatcatatgtaaaataaaaattggcatctggtatatcaattaaaagacgacctgccacagtttcaacaaactctataaaatcaaaacgctctgggttaagtttagaaactcctgcttccaatgcagataagtctaataatgatacaatcatattgttcattctatcagtttcttctattataacattcatataatttttctttttttcttcatcaacttcatccataagcccctctgtatacgcacgtataatgccaagtggagtcttcatttcatgtgaaattgcatctaccaactcctttctttgttccaatagcattctttccttatttacatccttttcaagttgaatatttgcactttctaggtctgataatgcctgttgtagatttgtagacattgtattcaggctcctagaaagttctccaaattcatcattagtatttacagtacatggattagaaaaatcaagttgggacatactttttgcagatttatttatagatgtgattggttctgaaataaattttcccaataaaaaatcaatactcataataaatataaccagtattataaaccaaatccaaaattcaaatttagagtttatcgaaaattcttcaacaaccagataaaataatataattaacgctcctgataatttagaaagtaaaaacactttttttctaactgaatatagtccaaaattttgtttaatccaatttgaaatatctacatttttcagtttttctataatctttcttaaactattcattccttaacctcaaacttatatcctgaacgaattaatgtaactatatggtgtccttcactaccaagctttttgcgtaaggtttttatatgtgtatctacagttcgtgtgtttccttcaaaatcatatccccatatacaatttaaaagcttctctctggaaaaaacttgattagggttttccataaataaacgcaataattcaaattctttatatgttaaatcaatcaatttatcttctacatacacttgccttgatgctaccataataaaaatctttcctaaactcaatgaatttttgggaatatcagtagtgtatctacgtaacaaggcattaacttttgctaaaagtacttttgggctaaatggttttgttatataatcatctgcgccatattcataaccctttaatttgtcctcctcttcacctttagctgtcaatatgataataggtatattagtcatttcacgtgaaactctacacactgaaaatccatctaaatacggcatcataatatccaatatcattaaatctatattgttgctctttaatattgtaagtgcctcgactccatcattagcagttatacaagtatatcctcccttttgcatatattctacaataatactttgcatccttttttcatcttctacaactagtattttagccatttctatttatcacctcttttttgtaggctttattttagtttatattaatttatttatttttcaactatttttttatagtatttttatagtattttttatagcattttgatagtattttttagactattcttaatggaattgatatcatagataaaaatagcctactaactttttctatgttagcaggctaaaatatttctaataataattatattattttgtcactattctattttttcgattaaaatacattctaaaacaaatatcttcaattaatgaataaattgcacttgttataaagtacagacctatggctactggagttctaacagttagtataagacttgttatggtagtcaccacagccatttgtttgttaaactttacttgagaatttatttttaaatatggtatataattcactaaatttgaagctaacataattaatgtatatatacaaggtaatataaacaaattatcaaatgtacctaaattagcaatccatggaattataattgttgtaaattcctttgtcatatctaaacatacatgatataaagcatatactactggcatttgaaccaaaactataagacatcccagcatactcttcatactttctacagaacttacttgtatttgcttttccaattctttagtatcattcttatacttttcttttatatgttccattttttcagctaattcttgctgtttttttacagaaaatctttgttttaatgatagtggcataagtactaatttaactattaaagttataagtacaatagaaattccaaaatcacctgtaaaattaaataatatacttaataatccttgcaatatacttgaaatgaaatccattttattctctcctttttatttttaaactttagaatttataatagattcatttcaaattaaaacaaactacaatacctccaaatatcatatttctgaaaaactatatactgtttaggcaaccgttcttcagaatatgtaattctatttacaaatatgtctcttattaaaacatacttaattttatgatttaagaggtctttacaaaaataaaatatacttccaatgatagataccaataatgtcatataaattagtacatataacatactatccatatctaatctcatcacatcacctcttcatcacttatatttatctttagacaatttcaaatcctaaataattccaacatttatatttagttttaaatataaataattatagtatagaaaactcctaatgtaaatatatagattattatatttatcatttttattcgtcatatttacatttataaagtatataatcttatcactcttaatttttaataaaaatcacctaaagtattcttttttatctctgaacaaaacaatattgggtttttatagcttatttttaaattataatccttaatttaatataagggctcaatataataaatcttaatatatataaatcctaatatatatctctcttaatataatattaaatacaacctttcatacaattttaaatataatgtctaatataatcccttagtataatcacatactttttgatacaatccttaatataatcgttaataattgtatactaaaatcaatgactttttttctgattaatgctaaaataattaaaaatagaaaataaatagatttttccaaaaaataaacggaggttacttaaaatgataagtgattctatatcaaaaagacgaagtatcagaaaatataaaaatcaaagcatttcacatgaaactatagagaaaataattgaagctggaataaatgcaccttcatctaaaaacaggcaaccatggcgttttgttgtcatcactgaaaaggaaaaagaatctatgcttaaagccatgagcaaaggtattcaaaatgaaattaatgataatgggcttcttccaggaagtcgtcaacatatcgctggtgcaaattacacagttgaaatcatgaaacaagctccagtaacaatttttattttaaatatattaggtaaatcacctttagaaaagctatcccctgaagaacgattctatgaaatggcaaacatgcaatcaattggagctgcaattcagaatatgtcgcttacagctgtggaattaggtctaggtagtctttggatttgtgatgtatactttgcatatcgtgaattatgtgaatggttaaatacagatagtcaattagtggcagcaatatctttaggttatcctgacgaagaaccatcaagaagacctagattacaattaagtgatgtgactgaatggagataaatagttatagtaagcaaatagtgcaaacagaatttatattaggtgaggtattttgatgaaaaaaattattaaatcttttacattttgttttttttaattgcattatttgagatttatatccaccaaattggtcaagactcaaaaagtattattctaataggattaaatcctattttgtctattatttctaccattgatagtttttttgtttttatggattcaggcatgcaaatcccatgtagaacaattacagggtcaatttcgatttattggtacatagcatctatactttcttttcttatttatggtataattttagatttaattagaatagttatttccaaaattggaaataaaacaaaataatcatcataaatagtgcattttcttgagctattaaacttcaccggatatagagacataacatatacttagcttcagaaaatgcacctttaaatcttcatatgaacattattttacttacattaatttaatgttacttaaaaattaatgtattgtatttctttaaattaattttctatatttcttaaattagtttattatacttctttagattaattttctatacttcctaaattagtttattatacttctttagattagctttctatacttcctaaattagtttattacacttctttagattaattttctatacttctttaaattaattttctatacttcctaaattagttcattatacttctttaaattaattttctatacttcctaaattagtttattacacttctttagattaattttctatacttcctaaattagtttattatacttctttaaattaattttctacacttcctaaattagtttattatacttctttaaattaattttctacacttcctaaattagtttattatatttcttaaattaattttctatacttcttaaatattgtcttatacctctgcaatcttattatggttactcatcaaattattttgctttatagtcaaggatttcatttcatgaactgcaaagtatatacataccattgccgctgctgcatctgctattggtcctgcaaacattactccatcaattcccataaacattggtaaaattactatcaatggaattaaaaataaaatttgacgagtcaaagaagtaaaaagtcccaacactgatttcccaattgatgtaaagaaagttgatgatactatttgaacaccatttataaatgttaagaacaagaaagttctaaaataatgttctgcaaatataaaataagtctcatttccgttaccaaatatagacgtaatttgtcttgggaagaattggaaacataagaatgcaataacagatataatagttgcacttcccactgcaaacttatatgcttcttttacacgattatacttttcagccccataattataccctataattggttgcataccttgtgatataccaataattatagatataaaaatcatatttactttaataatgataccgacacaagcaagtggaatctcacttccataaactgacctagccccataatatgccaatgtattattcataactatctgtgttacagtcattgctaattgattaaaacatgagcttgaacctagcgcaaatatatgtttataaattatactatctaatttaaaacttttcttatgtaatttaatatgttgaaaattctttatataatgaacacttattccaaaagatataagttgcccaataacagttgctaaagcagacccagcaattcccatattaaaaacaaaaatgaataatggattcaaaattgtattaataactgctcctattaacatacaaaacatagaagcttttggtctcccatctgcaagtatcaatttactcattccagtggacattataagaaatggtaatccaattgatgtaatttttgtatatgtgtgtgcataaggtagtatttctgatgtagagccaaagaattttaatagtggtgttaaaaatattgatactactataaataaacttattccaaaaacagccatcaagcatatagaatttcctgctgcttttgtagctttttctgaatttttagcacctaattccaatgaacacttagacgctcctccaattcctaataataatgcaattgcagtacatattgttgttagtggaaaagtgacatttgtagcagcattacccaatacaccaacaccttgcccaataaatatttggtcaacaatgttatataaagcacttactaacattgctataatactaggaattgcgtacttagttaataactttgaaaccttttcatattccaatggctccttatatttttcttccattttccttcgcctccaattttgcttcttcattcatatcaatagctaaaaatgcaactttctttaacattgacataaacaactcttgctcttctttctcaaatgaactcaacaactcctcaacatacccatttgttatttttagtatttcatcataacattctaaagatttttctgtaggatataaatgccatgttcttttatcctttacacctggttctcttgttataaagccttctttttctaaatttgccaaagctctcgttatattactaggattcacaagaattttctcaaatatagtgtcctgtgtaatacctggattattacatatgtgtaatacataaaaatattggctattattgattccaatatccgccaatttcctgtcaatataatttgtattgtatctatttataatggaaacccattttaatagctctctcatattctctcctttaatatctattgtcctcatttttttgcgttcgcaataatctatttgctcatgcaattattttactgctaattttatactttgtcaatagcacacaagtttatatttaaaccataaagttactataaattttatatattagactcttactttaatttaactatttttaaatcttcattgatatttaattaccttttatattaatttttttgcatatttatcaataattcctaattctttttagcttattttaaaaagcatcttgacgtaatatttattatctgtaataataaatatatcgaatcgatatatatctgattgataccaggaggtaatatgttagaatacattattttaggatttttaatggaaaaagaattaagtggatacgacttaaaacaaataatgtcagaaagtacctcgtacttttttgacgccagctttggaagtatctatcctgcacttaaaagattagaaacaaaaggatatatacactatcacgaagttatagatggtagcaaattaaaaaaactatattccataactaatactggtaaagaagtatttctcgaatggttaaagaaacctataaatttttctaaaacaaagcaagaccaccttgttaatatattcttttacaagtatctacccaaagaaataattgaaacaaacttaaaaatgttaataactgaagtagaattacttctaaataaattaagtaaacaaaaaattgatgtagaagaaaatcattgtattgaccaatatacatatatgtatgccacaatgatttatggagttgactattataattttgttattaattggtgtaaagatttactgaaaaatctataagatataatttttagaaataaacatacataataaaaggagatggactttatgaagcttttaatacatgatttaactgacaaagaattagaaaagttattacccaagcttgatgacaatataaaaatacttccaaacacaaaagaaatccacaaatgtattggtcgttttggttgctggattaaaactccttctgaatgtgttgtaaaagattattacagcaacatgggtaaacttataaatgaatccgatggaattattataataagcagatgctgttacggagggtttagcccttttgtcaaaaacgtacttgataaaagcattaattatattcttccatactttgtaataaaagataatatgatgcgtcataaaagcagatatgataaacagataaatttaaaagctatattctatggagattgtattacagaagctgaaaaagaaactgctacgaaattagtaaatggaaatgctataaatttcaatataaaagaacactctgtttgtttctatgaaaatatacaggatataagaggtgaatccatatgaatatagtaatgataaatggtagtccaaaagtaaataaaaataattcacagtattttttatctgaattaaaacaacttattcaaaatgataataaagtttttacatttaaagtagatagcacatctaagtatcctgacgctcttaatgccatacttaattgtgatagattaataatagcatttcctctttatgtagatggtattccatctcatttacttcattttttagagaaatgtgaaaaatttttaaaaacacaaaataaaaaacctattccagtgtatgcaatagttaactgtggattcaatgaaggtgaacataatcatttggcaattcaaatgatagatcattggtgcaaaaaaatcaactttacatgggttcaaggtattggaattggagctggggagatgtttggttcactagaatccgtacctttgggtaaaggacctaaaaaagatttaggaattgcattaaaagaactttcaaaaaatatacttagtgataatatacatatagatgattccaacaaaagtactatttttatttcacctaacttccctagattcctatataaacttatggggaatcatcaatggaatactcaagctaaatcaaatggattgactaaaagtgatatactaaagaaataaaattttacttcaacaaatactaaaaaccgtcaagcacgaataaactattcatcttgacggttttttatgttatttatattcactagacatgggataattcactacaacattgattatctagtctaatatttatcttattctttttgtaaaatccaagttgctccaacaaggtcctgctgtaaatcagtatattcatttttttggctaataacatattgttcaaacatatctttttgagaaggatattttttaattagctcatttgcacgagttataatccagttcatttcctcttcaacatcattttcaagttctaaacatggtatacattcaattagtttcagacctaattctttgaacaatatacaccactcattgtaagtgggatacaccctctcaaaattaagctgttcatttgtagatttatctactacatatgcatcatcaattaaaatgaaccccttactttttattgtaggtaatagcttacttatagtttctttataattacctaaaatatcccctacagctccaaaaatcacacaatcataatcgtgctcaatttttacagaactattagcatcattcatttcaaaatcacacaaagcatcaaccttatattcaatagcctttcttctcgcataatcaataaattcaggtatcaaatcaatacctttgatatgtatattcaactcttttgcaagcttcacagatacagcaccttttccacaagctaaatccaaaacttttgtatcctcattaaaaggtatatgctttctaaataattgtaacatttgttctggtgaacttcctaattcccaaaaatcttgtaataaataaggcaaataaggtaaaatatcagtagtatcagaagttagtgactctgccaatttttcttttacagtattattcattttttcaacctccaaaatttaaattattattcaaaagtaatattattttatatacttcttcataggtactacaaacagtggaaaatgcttttgacctttgtatttttcaattcatttcttttctttatgagctgtaataattgtataactgtgagcgtttactgttataatacaatcatatacacttatataccagttttttccctttctattaataatggcatttggagattctattttagttttacaccagttcactacatcatttgtctccaaagaaagatttttcttaattcttacaacgcctaactctgttgtatgcaatctatctaggtttttaagtaattcgttttctacattcatttttattaaaacactttatcctttgcaaaattaaatctattatttagtactattttatcatagtattgtgtattttatcataatcttatagtaaaactatttctttcctacagactataaattatttataaatacatacttttataaaactttgcctatataaatccacctactttatacataatcccttcttttaaatgattggaacccaaaactgaatttcactcaaaccattcttatcagttttttctccgtattttacaaaatcatataaattattttcattaaactggcaacttgaattaaggaaccattcttgatagatatattctacaacattttgcatactatcctcatttttcccaataaaagtaaaaacaatataattacttttcggtaatacgaatttttccattccattaggaatttaccaaaagtagctacttgaacacctgcaatatatgtaaatgtaggattattttcaatttctttaaaattactataatcattaactccaattaaaaaatccaagtctaccttgttttctatcaactctttatttttatgcaaatccctccaacattttccaataacatgaaatcctttttttactttaccagaatagccaacaatatttatatctgtacaattaacttttttaacatctaaaaccatacctccatgtaacctttttctattattaatatcaaattttaattgtagtggtaaaaaatcttgatgttttctaaaaaacttagggctatgcttaaacatttttttaaaccctgttgaaaaagaacgttgtgtgtcataccccgagattaaagcaatttcaataattggtttttctgtaaaaatgagcattcttgctgcttcagttagtctacgtctttgtatataattatgtatactaaatccgacaactgatgtaaacattctatgtaaatggtactttgaatagcctatctctttagaaattacatttaaatctaacatctcatctaaaagatgtttttctatataatctaaagttttttcaatggtaatcaaattgttatccatatagcacccctcctattttaaagatagcatattattttattttgtttttcacattctttgctaatattttgatttattttatggcacacaaaagacacttctatttgaagtgcctatctactctgtatattgagcttcttatttcaatttattataatcttcaatagatacaggttctagccatttattgaaagcaccttcagcagttacctcgtctacagccaactgctaaattctcttctataccttaatctaacttttccacttcaagtatacaacttgaagttagctctaaatcaatagtttttatcacaacaatttgattttaaatttaaatttattcttttaaattatcatcatctattatagattttcttatattcaataactggtctacaaattggttagcaggagtatttaaaatattctcaggagtatcatactgttgaacaactccatgatttaataccaaagtctttgttcccaaaatcaaagcttcataaatatcatgcgtaataaagataatcgtaactcctgtttttttatgaatttcttttatctctttttgtaattgctttcgtgtaatctcatcaactgcaccaaaaggttcatccattaataaaatttctggagaagaagctaaagctcttgcaatccctacacgttgttgctgaccacctgacaattctgatgggtaacgcactttcatatcatttggcaatcccactatttccatccacttgtttacagcactttttacttctaatttattctttttacttaggagatttggtacatatgaaatattttcttcaacagtcatatgaggaaaaagaacacttccttgtacacaatatcctattcttcttcttaatttaattaagtcctcgtttttgatatctgtttggtttatcaaaatatttcctccatctggcaaaatcagaccattaatcatttttaagagtgttgtcttaccagaaccagacgaaccaattacagtcaaaaactctcctttttctatatctaaattaagattatctattatagttttatcattatattgttttttaatatttttaaattgtataataggtgtcattatatttcctccaatttataaaagacctttcttattcagaaactcacaagcaacttctctaggttctaaattgttgttttctacgtcataattcattttagccatttctttatcagtcaaaatatctccaaccatcttaaatacctctgatagttctggattttcctctaatacttccaaacgaacaacatttccacattgataagatgggtagaaatttttatcatcttttagaactataacatctgaaacactatactgaccatcagttgtaaatataggcattacgtcaatcttaccttcattgatagcttggtattttaatccaatatctaaatcaactgtatctttaaagttcagtccatatgtattacacaatggagtatatccatcctctctctcataaaagtcatattcagctccaaatgtcaatttagaagatacattttttaagtctgatatattttttaaattatatttatctgcaacttcttttctaactgctaatgcatagctattagaaaaaccatacataccagtccattgcattttaagtttagttttgtattccgactgtagtttactaaacatactttcagtatataattcatttttcttaagtaccatattccagcctgtacctgtatactctggataaatgtcaaattctccattctccatagctggctggatattagatgttccccctcctatgccttgtgtaatttccacgtttagacctgtgtttttttcaattaaaatatccaacatctcaccaagaatatattgttcagtcataggtttagtagcaatatgaatagtttgagtctttgaaggattaaataaataagacgtaaagatagttgctataagaataaggcttcctagaatggcaaaaacttttttcctatttttcttttttctttttcgttgaaaaaatttttctaccagccctaaaataaaatcaaatattaaagctaatagagcaataagtatacttccactaattgtcattgctgtgttatttgtcgtgattcctctatatatggctacacctaggcctccagcacctataaatgaagcgataccagctaatgcaattgtcataatcaccatatttctaataccagacataataacaggtagggctaatggaagttttattttatacaatatctgaaaatctgtactgcccattcccctagctgcttcaagaatatttttatccacattagtaattccagtatatgtatttctaaccattggcaataatgcataaatggtaagtgcaataacagcagtagtatttccaattccggaaaatggtatcagaaatcctagcatagaaatagatggaatggtgtatagaaaattgatagttcccaatataggtttagaagaattatgaaattcacttacaataataccaattataccacccaaaacaatcgcaattattatagaaataatagaaatcatcaaatgttctatggatagctttataaaaaaatcacttctttcagataataaggttagaatatcatttatcatccatctctctccttttataagttttacttaacaagatttaaattttaatgtagttaatctttattgtttatacatcagcaaatcgtcatcaaattatttcacaaattatatattaagattataatctgaacctcccatgactgaagtcacaagtgtgtatagccattttttaatcaaacttgcaagtagacacaaaaaagtaactattagagactccatcttcgatactctccataaaaataagaaaaaaggtcagaatcgttaaaatactaaaatttaaacaaatttctgacactttatttaattaaatttgaatatttctcacattatttattactgttaagtttaattatcattttatatacccattatatttattaaaatatcattataattttattatattttatttattatactatatattttgctgttaatgatattttattgttacataattgttttgggataccttcaaatattactctcccgccttttgtccctccttcaggtcccagctcaataatccaatcagctcttttaattacatctatattgtgttcaattattatgaccgtatttccattatctacaatctcttcaattatacttataaaattctcaatatcagccatatgaagacctgttgttggttcatctaatatatacactgaactttccttatttaattcactagcaagctttaatctttgacactctcctccagacaaagtatcaagagtttgtcctaaagtaaggtatccaatacccattttttcaatacattgtaatttcgttttaatctgttttaaattaaaaaactcaattgcgtctaaaacagacatttcaagaacttcaattatattcttcctttgaaacctatattctaaaacttcttttttaaattttttaccttcacaaacattgcaggtactctttatactctccataaaagcaagattcatttctactattccagaacccttacagttatcacaagctccttctgaatttgaactgaataaagaagcatttacgccatttgtttttgaaaatatgcttcttatgttgttcataattccactatatgttgccaaactcgaccttgaatttgctgaaacagggctttggtctataagtacagcactaggattttgctttaaaaattcatccttaatcaacgtacttttacctgctcctgctactccagtaactagagtcaatacacctttaggtatcttaatagatacattttttaaattgtttttattacaatttttaatttctaaatatccactatgttctcttacactttctttaataggaagaaatttacttaaagcattccctgtcaaagtaccacttgtaagtagatttttataactgccttcatacacaacttttccaccatacttacctgcctttggtcctacatctacaacatggtctgcaatcttaataacatctgggtcatgttcaacaactataattgtattccctttatcacgcaatttttttaaaagattatttaatttatacacatcttttggatgaagtcctacacttggttcatcaaaaatatacattaaatcaacaagattactatttaaatacttaaccatctttatacgctgagattcccctcctgatagagaagatgtctctctatccagtgttaaatatccaagacctatatctatgatactgtttaacttttctattattcctttaattaaaggttgtgcttctggctcatttatacttttaataacttcagccaattcatcaatttgcatactagttaaatctgctatattataaccattaattaaagacctatatactccttcattaagtcttcttccatcacatataggacatctatcttctataagaagtttactcaattttttcttagtagcctcagatatttctccatctctacttaagtatagacgattaaatttaaccattaatccctcatatgtcatgttagtttgaccagcattttctatcttaatcttttctgctttaccatgcaaaaacttttccaattctacttctgaataatcacatatcctcttattaatatcaaaaaatcctgattcagcgaatatattccaatgccaagaacccactccaaaccctgaaagcaatatagcaccttcatttaatgatttattcatatcaagaatttggttcatattaggaactagcttttttccaagcccatgacagtgtgggcacataccatcaatatcattaaaagaaaacatattagcattacctatatactcactaccaaaccttgaatataaagctcttaaaaaggaatttacatctgtaatagtacctagggttgaccttgaatttccaccaagtctactttggtctatgataattggtgttgacagattttctatacaatcagctttaacctctccatacttaggtaaaaaacttcttacaaatgtactaaacctttcatttagttggcgttgtgattcttttgcaattgtctcaaatacaatagatgactttccagaacccgacacccctgtgaatatggttatttttctttttggtatttttaaggaaatattgttcaaattattctctttgcaaccttttaaaattataaattcattgctcatattttacctcctgcattatttttctttaaattatttagagaaaatcgtaataatagttgttagttatacataagtgaaatactattttattagattactcctttttttataaacacaggtcaaattatagcatgtagattttatctggtagtatagtgtagggtttgatttttataaaaaatacagttattttatttaagcgtaattgcatctattctacctaaatatcatcattatatatgagtgttaaattatataaaattcttaagttaataacctcaaaatggtattagttacataaaaaaagtatcttgcctatgattttaaaaccataaataagatactatgttttacactgtttcttctttcacaaataattctatacaattattcaacttaactttaaaattttaaacattaaaaacctctatctttaaatctttaaataaaactaaatttccaataccttcaaaactatagaaaattccaatcaacttatcaaacataacttactacttataagaaattaatcttcacttaatacagacgtaagttcagggtcatttagaagatgttcaaaataactatgtgccgaaatatatcctataccatacattttacgctttgaatttacaaccttatattcataacaagcactcttaaccttattgtagtcatcaaaatccattgctttatagatagctctttcatttcttggtatatactttacatattttggcttaacaaaatacaagtcatcttttatcttaccttcacgtttaagtttctttaaaacttccccattctttctatgcattatatggtcatcatacttatagtgatgggctatatgggtcacattgcctttaaacttatgttcaaaatccaatatagtcttttccattaattcataatgtgtgccttcctttttatctatatctgcaagtataatcacattttgaggtttcactccaagctctctcaaagctgatttaaactcattatttctaagctcttccttttgcttcctagttaagtttctaaattttgtgttagctttgaaaacgttaactccagaaccatctgatactaataccacatatacattatcaacaccacactgttttatagcatctacaatggcacttcctccccataaaacctcatcatcttgatgttgaggataaaacactgctgctgatttaaattttctactattactctcaggaataggtatttcaagttttccgttaaaattctttgcaattaaaaatatcatcaataatattaatatacttattcctatgtacttcgttttactttccatatttaaaattttctccttcttctgaacctcccatgattaaagtcacagggttactacttcatagaatttcgtataatcaactcaaatatcttataaacctttgtgtcaatcaggtctaaatatacaaattattttacaatattttattgtttcatacaatctttgacacgaactataataaaataaaaaagccttctaactgcaacattgcaaatattacagccagaaagcttcttaattcttaaaatttattaagcttaaaaatttattaaatttattttttaatataaatatgtctattattaataaattatactttaattactatatcaatacgactttactatatcactataacattacttatatcaatacaactatttttatagcctacatttcctttaaaatttcaagcaactcttcttcactatacatatacttcttattacagaactggcaaccaacttctgcttttttatcttcttctattatctgagccaatgattttttaccaattgcaaccaaagcagtttttactctttcttttgaacattcacacataaaccctacttcacaggtatcaagtattttaggttccaaaccatccaaaacaatatttaatatatcatctggtgattttccttcttttaacatgttagttatagaaggtaatttagctacattttcctctaacttagcaatagtctcttcttctgcatctggcattaattgaactataaatcctccagcaaactctacttcatcttcttttgtaagaacacctaaagctactactgatggagtctgctctgatacagcaaaataataagtaaagtcttctgcaatttctccacttaccaatggataagtcccattatatggttctctaagacctaagtcttttataacttttacaacaccttctgtacctactgctgctgctacatttaactttccatttggatagtcttcaacctctacttgtggatttcctacatatccttttaccattcccttagaatctgatgtggcgataatagttccaattggacctccaccttttattattacagtcaatttatcactatcatttttcatcattaatcccattatagatgtggctgttaatgttcttccaagtgctgctgttgctacttttgtagtttcatgtaatcttctagcttcttctactgtatttctagtagttgcgacaaatgctctaacttgaccatttcctgatgtcgctcttagtacataatctctcattaatattcctccatgtcccgttaattgtcttatttttattatattactaccttaattttaatctataagtacttatctatattaaccttgggcaaaacccattttattttaattttactaagcaatagttattatattttaatttttatctatagaactttataattattagaaaataaaagtcataaagtatcatcactttacttttaatctataaaactgcattttctatatttttatatcatggttatttttaataattatcttatatagtcaaaaatatcttattttttacatacaaagaagattctttgactttcttcactgggtttgtcaaatgtaaaatccccataatattttatatccttaaatccagatttttcaagcatatcaactatctcatcttcagtatatgctctttgttggtgtatctcttcaaatctttcaaactttccacattcatctttaataaagaatgtaagttccatttcaattagattctcttcttcatcaaagtaattttgccacatatacgctatatcttctctattttctccatacatgttatttcccaatatgttggctaatttataaaaagaacttatatcaaatatgaatattccatctttctttaataattcatatgtctttgaaaatacattttccaaatcatcatcataagttatataattaaatccatcacaagcacaaagcacacagtccaaatcagatatttcaaaatcaagctctgatatatcttgttgaagtaaaactaattctactccttctttttctgccttttctcttgctacactaagcatctcatcagatatatctataccagctatatcgtaattttttttagtcaatggaattgtaagattacccgtgccacatgccaattccaatatattttttacttttacaccttcactatctattatatcttctatatatttaacccaaccattataatcaacttcattcataagttcatcatatacaaacgcaaaatcactatattgactcatcctttttattctgctcctccacaatctttttaagcctctttttgcgtgatgtaagcatacctccaattcttcctgcttccttagctgtaagtcctgcccatccacgttcaccaactttatccataagacctagttctgaggctatctcatatttcattatatcatcatttgtcaatattttagtattcttgccattagttatcttcttttctctttgtactttttctttcaaaaaaatcaccccttcttatttgtatttttgtcaattaaaataaatttatacaaatatataaggggtatttattaatacattttttttaaatttaggtatttatgctttttaatctttataatttatcttcctaatctattgcttctttgtattttaataattttgaataaacattcaatgcatttacacatatcttttcatcaaaattaaagtttatattatgaagaccatttacaaatcctttttcttcgtttcttgaacccaacataaaaaataatcctggaacttctttttgataataagaaaaatcttctgatatcataagtggctctaactctacaacagtatcacttccaatagcctctacaaactcttgatacaaatccttgtcatttttaacagcaatataatcatctataatatttatattaaccttacagttataagccaattcaaaccctctagcaagttctctaactctaagcttcattttctcatacacttctgggctgaaacatctcatagtaccttccatctttatattttcagctattatatttcttctagctcccccttcaattctaccaatagtcaacactgcattgtctattgggcttatatttctagacactatagtttgaagtgagcttacaaagtttgaagctatcactataccatcaataccattttgtggcatagccccatgtccacttttagacactatttctatgtcgatatctcctatttgagccataaaatagccttctcttgtacctacataaccttctggtaactctggatatatatgaagcccatatatttcatcaatattgtattttctaagcactccttcatctattaaagcttttgctcccccaggaccttcttctgctggttggaatataaatactatattatcatttaagtcttctttattatcatttaaatactcaattaatccaagtaatatagtagcatgtccatcatgaccacataaatgttttaccccttcttcactatgaagaccatctatgtcagctctaaaagcaatatcttttttaggtcttttaccttctattacacctactatacctgtttctaaataaacttcatactcaattcctaatttatcaagataatctcttatatattttgaagtcttatactcttttctcccaatctctgcaataggatttaatgacttcctatgtttataaagttgttcttgtaaatatgatgcctctctcatgtaatctcctccaatttctaatttattaaaaaatatttctatatttctttataattaaaatattatatagcatgttatactaattaaaaataaaaagctaaattgaatataaaaatattttgcattattaaataattcaccattaataataattcccctgtttcataaatcaaaacagaggaattattattggaaaattttatttttagcaagagaagaaatgtttagcaagtccacccttagctgtttctttgtacttatccatcatatctataccagtttctttcattgtttcaacaacttggtctaaggagacagaatgtgagccatcagttaataatgcataattagctgcatcataagctctttgagctgccattgcatttctttctatacatggaatttgaacatatccatatacagggtcacaagtcattcctaaatgatgttcaagtgctatttctgccgcatattcaatatggtctatagttccaccttttaagtatgctactgctgctgctgccatagaacaagctgctccaacttcaccttgacaccctacctctgctccagatattgaagcattagtttttattatattacctattattccagctacaagtagtgcttcaattattttttcgtcatcataattatagaaatcctgcattgcaaagaatattcctggtattactccagcagaaccacaagttggtgctgtaactattatattaccagaagcgttttgctctgaagctgctagtgcatatgcatatacaagtgttgagaagctcttatcttttttatatgcattataaaatgtacttgctcttctttttaataataacttgcctggtattatttcatctgtacttagtccatcatcaatagattttctcatagcatcttttatagtttttatataatcttttatgtcttttggttcacattccaacacaaaatctaccaaagtcttattattttctttgcaccattttactatctcatccatagtatctaagtgatatatactattgcttttactgtttctttgaccttcttctgctatagtccctccacctacagaatatacagtccattcagctgttacatttttatctttatctaaagcttcaaacttcatcccatttgggtgaaaatcttttataatatcttcttcccaaacaatttcgacttttttaggtgctatagttttttcaattatatagtcagttaagtgacctttccctgtagctgccaaactaccatataatattgctctaaaactttctgcatctgggttttcattcttaaatctctctgctgctctttgtggtcccatagtatgagaacttgaaggtccacttcctattttaaaaagttcctttaaagtatccatattattcctcctaaatttacggtattattgcttattgttagattttacgcacatatttattataacctaaatatattaattattagttattaaattctcataaaatttattttttatttccattttggtatattttattaaattaatatgcatattttgagaataaaacatttatttaaaatttttctaatattaatataatataaatatcttatttaaacagttaagatattaactatacctattaaaattaattaatttgtactataattattattgtacttaaaaaattaaatttagataaaaaaggagatttgattatatgttatttaaaggttctgctgttgctttagttaccccatttacagaggataataatgtcaactttgaaaaattaggtgaattaatcgaatatcacattgagaatggcacagatgcactagttgtttgtggaacaacaggtgaggcgactactatgagtgaatctgaaatttttgctgtaataaaatatacagttgaaaaagttaataagagaatacctgttatagcaggtactggttcaaacaatactatgttgtctgttcatatgagtcaagaagctgaaaaattaggggtggatggtcttttaataataactccttactataataagactaatgagaaaggtcttaaacttcactttgaaacaatagcaaatagcgttaagttgccaattattttatacaacgtaccaggaagaactaaagtgaatataaagccatctgttgtggccgaacttgctaaaatagataatatagttgctgtgaaggaagcaagtggagacttagctcaagttgcagaaatagctaaattagtacctaaagactttgctatatactccggtaatgatgatactatactaccactattatcattaggtggaagtggtgttatctctgtacttgctaacatatgtcctaaagaaacacatgatttagtaactaaattctttgaaggtgatattgaaggctcaaaaaaattacaacttgatatggatgctttaattgctgctttatttatagaagtaaatccagttcctgttaaaactgccatgaacattttaggttttaatgttggtgatttaagacttcctctagctgaaatggaagaaactaatcttaatgtgttaaaacaagaattgacaaattttggatttaagttttagcaatatttatataaataagttgattttttcttaaatatgtattattattagaataatcaaattttaatatcctattaacctagggtagaggtagctgtaactaagagtatccaatagtagctggcaggtgttaatgattggaaaaaggatttacagccgaagaaaatatttcttgcaataatattttctgggattgcacataacatgtgtaatactgtcacttatttttgtaggtgatgagctacagggtttactttgagtgataaattagacgtacaaagtatacctttgtacgttttttgtatataattaaagttgttaatataatattaaagtttttggatatataaaaatattaacatatcttacttgtataactaaaataaaataatgttttaataatttaaaattggggtgaatttatatgaaaaaagtaaatgtagcaatagttggtgctactggaatggtaggtagaacatttttaaaagtattagaagaaagaaattttccaatagaaaatctatttttattctcttcttctaaatcagctggttctaaagtaatgttttgtggtaaagaatatatagtagaagaattaaaggaaacttcatttactgatagaggcatacaaatagcattattctctgctggtggaagtattagtgaaaagtatgctccaatagctgcttcaaatggaatcttagtagtagataactctagtcaatggagaatgaatccagatgtgcctttagtagttcctgaggttaatccagaagccataaaaaatcataagggtataatagctaatcctaactgctctactatacaagctatggttccccttaaagctcttgatgataaatacaaaattaagagagttgtttactctacttaccaagctgtatctggttctggtgttaaaggtgttgaagatttagagaaaggaatgaacggtaatcctactggattctaccctcatcaaatctcttacaactgtcttcctcatatagattcattcactgaaaatggatacactaaagaagaaatgaaaatggtaaatgaaactatgaaaatacttgataactatgatttaaaaataactgcaactactgtaagagttccagtaaaaaatggtcatagtgaatctataaatgttgagtttaacaatccatttgagttagatgatttagtaaaaacacttgaagaagctccaggtgttgtagtagttgataatcctgctaaaaacgaatatccaactgctgtagaatttgatgatagagatgaagtatttgttggaagaataagaagagattttagtgttgataatggtgtaaatctttgggttgttgctgacaatataagaaaaggtgctgcaactaacgcaattcaaatagctgaaatggctttatcatacgatttagtataatatacaaacttgtataaatatataattttgtaaaatattaatagtaactcaaaaacaagcattagaagtaactgtaatataaaacacaaaaataaaaaagaggggattgattttatatgatatttaaaggttctgctgttgctctagttacaccatttacaaaggataacaaagttgattttgacaaattaggtgaattagttgaataccaaatagctaatggtactgatgctatagtatcttgtggtactactggtgaagctaatactatgactgatgaagaacaacttgctactattaagtatgttgttgaaaaagttaataaaagagttcctgttatagctggaagtggttctaatgatactatgcactcagttaacttaagtcaagaagctgaaaaattaggagtagatgctctattaataataacaccttattacaataaagctaataaagctggacttaagcgtcattttgaaacaatagctaacagtgttaaacttccaattatactttacaatgtccctggaagaacttgtgtaaatataagtcctagccttatagttgaacttgctaaaattgataacatagttgctgtaaaagaagctagtggagacctaggacaagttgcagaaatagctagtttagttccagatgactttgctatctactctggtaatgatgatactatacttcctttattatctttaggaggtcaaggagttatatcagtacttgctaatgtttgccctcaagaaactcacgatttggtagctaaattctttgaaggcgatattgaaggttctagaaaattacaacttggtatggatgctctaatcgcagctttatttatagaagtaaatcctataccagttaagactgcaatgaatttattgggattcaatgttggagatttaagattacctctagcagaaatggacccagcaaatttagaagtgttaaagaaagaattagttaactttggactaaaagttaatgcatagtaaagattaatgcatggtaaaaagtaagtttggtcaaaagttagcccttaatcataggaggaaattatgttaaaagttatagcaactggttatgatggaaaaatgggtaagattttagccgatactataagagaagataatgaattagaattggtttgtgttgcagctagaggtctggatagctatgaaggcgaccttaaaatttatgaagatatgagtactatagttgaggaagctgatgtagttatagatttttctcatcactctaatttagataatatcttatcttacgttttaaagactaaaacacctttagtaattgctactactggatataatgataacgaaatgaacaaaatacgtgaagcggctaaagttattcctgtattccaatcatataatatgtctcttggtgtaaatgtattagtaaaattggttaaagatgcagctaaattactagaaggatttgatatagaaataatagaaaaacatcacaacagaaaagtagatgccccaagtggcacagctgttatgattgctaacgctataaaagaggttttgccaaacgttgaaaataattatggtagatatggtcgtagtgcaaaaagacaaccaaatgaagttggtattcatgctataagaggtggaaatattgttggcgaacatgatgctctatttgctggagacaatgaggttcttacaataagccatcaagctcaatctcgtggtatctttgcaagtggttctatagctgctgccaaatacttagttaagcaaaaaccaggattttataatatggacagcatgttgggataatagtataaatataataatacacaatataaattaaacatatgcaatatagatataataatacgcaatacaaatcaaacatatataataaatttatttaatactatgtctatacaataaaaactaactaaaataaaatataaataataagaagtaagtatatactaaaattgacaaataagtatataataaaagaaatataatgaaatacaaggagaattaacaaatggtaaatttaaacgatgcttatgaaatagcaaggtatataaaagaagttaaaaagaaaacacctgttaaggtatatgtaaatactaactctttacacttccaatcaactgataaatttaaggtatttggaagtaatggttcttatatatttgtaggtgactatgaggatataatggaagtattagataaacatgggaatgatataacagatactcatgtagaatatgatagaagaaattctgctattcctctaaaaaatactttaaatgaacatgcaagaattgagccaggtgcaataataagagacatggttactatagaaaaaaatgctgttgtaatgatgggagctgttataaatataggagctgttattggtgaaggttctatggtagatatgaatgctgttattggagctagaggaactcttggtaaaaatgttcacttaggtgctggtgctgttgttgctggtgttttagagccaccttctgctactcctgttatagttgaagatgatgttttaataggagctaatgcagttattcttgaaggtgttagaatcggtaaaggtgctgttgttgcagctggtgctgttgtaactactgatgtagaagctggtgccgttgttgctggttctcctgctaaagttataaaaatgaaagatgaaaaaacggctgacaaaactaagcttatggaagaccttagaaatttagactaattaaatagtactatattattaattagaaagattaattaaacaataatatactaatttaaaaaattaattaaaaaggtgtctctgtatgaatttaattcatcagaggcaccctcttttttataatatttttatcttttatttataatcattttatttttttacaattctcttattcattcttatatcatttttatttcttgatgacaagtatttttatttccttcaatttttcaatatatcaatgtaataaactattaaactttttataatttaataaatagaactgctgtttactactggttgtgcatctttattgccacaaagcacaactaacagattacttaccatagctgctttacgttcttcgtccaaagtcacaacattattttcacttaaattagtcaatgccatctctaccatacttacagccccctcaacaatctttttacgtgctgctattatagcctctgcttgttgacgttgtaacattgctgctgcaatctctggtgcataagaaagatgagtaattctcacttcacacacttcaattcctgcaatgtcaacccttgattgtaattcatcttttaatctatctgctatttcctgactactaccacgaagagatttttcatctccatcttcagatacatcatatggataaagtcttgaaacattacgaatagtagaatcacactgaatagataagaatgtattataattatccacattaaatactgcctttgttgcatttataaccttccaaattacaaccactcctattataattggatttcccaataaatcattgactttctgcttttcattattaagagtcattgtttttaaagatacttttttgccccttgaattagttgatatatctaccttttcatcagatgaagatttcgatacattaattcttgatactgctgggtttattgctgaacaaaatggattcacccaatagtacccttctttttttatagttccataatagttaccaaacaaaactagaactatagcttctttaggattaatcatttttagcccaaaaaataggataaaatctactactataaatacaagtcccaaaattaacataagtgaacctattccagtaaatccactatcaagttttactatcccaaaaaccatgatacctattgaaactactaaaaataatacaatcattatcaaagctgccactccattgaatacttttgcgtctttctcttgataagttttttcttcttttaacatatctatcactcccatctcagtatattaagttaagatatttctaatttaataataacacttttaacaattaaattgttgaatttaaaattaatactatatgtttatatattttttatacatctttatgcatacatgtatttagttattttaatgtattaatattgatttccaaataaatcatatgatatatgaatatggtatctcaaaattaactttttagttcatggggcactctttttgatatgaagtcaaatatatttttatcatttatacaatgaaaaagaagtttatctatattttgaaaaatccacttaaatttttttaatgtaagataaattgtaagcttattatcactaatattattttatataaataatattagtgataaaataaacttatagaaatataacaaatttttattaatttcataggaggaatttatattgaaagttataattaatggctataatggaacaatgggaagagttttagcagaatgtgtaaaaaaagataatgaattagagttggtttgtggtgtagctaggtctgctgatgaaaaaggtcatcatagtgatacaaagctttacaaaacaatgactgatgtaactgaaaaaactgatgtcataatagacttttcacatcatgagactttagagccaatattgtcatatgctctaaaaaataatacacctgtagtattagctactactggatatgatgaaaatgacttaaataaaatagaagaagcatcaaaaaacattcctatattattatcatcaaatacatctcttggagtgaatatattaataaaattagttaaggatgcttcaaagatgttagaaggttttgatattgaaatcatagaaaaacatcacaatagaaaagaagacgcccctagtggaactgctactatgatagctaatgcaattagagaagtcttgcctgaaagtgaaaatacacatggtagatatggtagagattgtaaaagaaaaccaaatgaaattggaatacactctataagaggtggcaatataatcagcgaccatgatgtcatatttgcaggtgataatgaagttcttacattaagccatcattctcaatctgatgaagtatttgcaaacggttctatagttgcagctaaatttttaattggtaagcaatctggactttataaaatgtcagatatactaggataagttttgtacataataaatctcaatctatttaggtattcatattcatcaatttgaatatctaattgattgagatttctattctaaaagtttataaattttatgcttaccttttaaatataatcatttttcttaaagattatcttatttattggtatatggaattatattgtttattattttatagtcctttcatcatataaacctattaaatattatcctatttattggtatatgaaatcatattgtttattattttatagtcttttcatcatataaacctattaaatattatcctatttattggtatatgaaatcatattgtttattattttatagtcttttcatcatataaacctattaaatattatcctatttattggtatatgaaatcatattgtttattattttatagtcttttcatcatataaacctattaaatattatcctatttattggtatatgaaatcatattgtttattattttatagtcttttcatcatataaacctattaaatattatcctatttattggtatatgaaatcatattgtttattattttataatcttttcatcatataaactattgtattctataaactgatacatacccagctggagaagtacctgtcgtgcctgaaccaaatgtaaagcttaaagtaacagctgctgctctagcatcaactaaaaagcttaaacttacacttacatctgatgaagtaagcgtatttactgcttttgcaataaagttattttgggctactccattaaagttagtagtaattgacataaatcctgcaagtgaaagtatggcacgtataccgaaagatacattgtatatccctccaactgcaagatttatagtactacttgttggaaaagttatattagttccatttataaatgatgaattaaatgtcactaatgtattattccctaaacttgaagaagatactgtaaattgtgcattgtttgctgctaacactcctgttgctccggtcgctcctgttggacctgttgctccatttgctcccgttgctccggtcgcccctgttgctccggtcgttccatttgctcctgttggtcctgttggacctattggacctgctactccatttgctcccgttgctcctactgctcctgttgggcctgttgctccatttgcccctgttgctccggtcgctcctgttgctcctgctactccatttgctccggttggacctgttggacctattggacctgctactccattcgctccagttgctcctactgctcccgttgggcctgttgctccatttgcccctgttgctccggttgctccggttggacctactgctccatctgctcccgttgggcctgtcgctcctactgctccggttggacctattgccccagctactcctgttgctccggtcgctcctgttggacctaccaaaccatttgctccggttgctccggttgggcctgttggacctaccaaaccatttgctccggttgctccggttgggcctgttgggcctgttggacctaccaaaccatctggacctgttgctcctactgctccggttggacctgttgctcctattggacctgtggcacctgttactccatttgctcccgttgctcctatacttccggttggacctgttgctcctgtatttcctgttgggcctgtagcacctgttactccatttgctcccgttgctcctgttgctcctgttggacctgttatcccattcgctcccgttgccccagttgctccggttagtccggttgcaccatttgctcccgttgctcctgtatttcctgttggacctgttattccatttgctcccgttgctcctgttgctcctgttggacctgttatcccattcgctcccgttgctcccttgtttccggttggacctgttattccatttgctcccgttgctcctgttgctcctgttggacctgttattccatttgctccagtcgctcctgtatttcctgttggtcctgtagaacctgttgttccatttgctccagtcgctcccatatttcctgttggtcctgttattccattcgccccggttgctcccgtatttcctgttggtcctgttattccatttgctccggtcgctccggttgcgcctctaggccccgtcggtcctgttggaccagtagcacctgttggccctgttggacctacatcttgatataaacttggacctgaaatatcactcatataattaatcctccttttttaaagttagagtattactctataaatattgagtattactctatataattatatgaatcgacaatttcttatgtgataatgtatctatttgcttatatcaacatatatgctttgattcttaaatttcattacttttttgtaaaatcttttacaattattagtactcttttacaattattaatacaattaaaaaactcatttcccatcaattatttaaaatttttttattatgttataaaaaatagataattaaattgcataaaattaatttaatactactttaattactttttaaataaaaaaacctcaacacgattaataaaaatcatattaaggcatccacaaaattatataattgcttatctatcttcatcagtaacattgaatatataaggaacatttctataataatcaccaaaatcaaacccatatccaaccacaaacttatcttctatttcaaatccacaataatctggcactaaatcaacttttcttctgcttggtttatccaaaagaacacagcattttaaactagcaggatttttagcttttagatgttttaacacaaaatccatagtaagtgcagaatcagtaatatcgtctacaaccaaaacatcatatcctgctatatcagtagtcacatctgaaaccactttaacctttccagtactttcttcattgtttccataactagatgtagtcataaaattaactctaagtggtaaatttatatttctaactaagtctgcacaaaatataaagctaccttttaatagagaaactaccataagatttttatctttataatctttttctataattgctcctaattcccttaatttatctttaattttttcttctgaatacaatacttcccatttttttgtttctatatccataaaaagacctccaattgtaataatccttcttaattttataagagattgctcactttttcaatactcttattcaatattagtcaatattattgagtttttatgttcattcaacaattattaacaatgtatcttatattttaagtagttcatatatccacactaaattacatactatatattttagacaaaaaaagaaaaaacttgcactaacaagttttttctattatacataaatttatacataatcatattttattagagggtactaattaaatttatttatgctatttttgttatacctcataatacaaaacatattataaagtactagtcaactttattcatatcattcattacatttaagattatctcatctgttatagacatacctttgtcacttactctacctaagttttgtatactttgctcaacacttgaaccaactataccatttagtggtggtacaaaacaatcttgcttagctattatagcactttgtatagctgcagatgctgcagaagataattttaatgcacaaccagctttcgcaccgtcacatatcattccacttaagtcagctatcatattttctatagctccttctatttgcttttcagtaccattcataagccaagagataccagcagttgctccagtagaagcagcaacaccacatccacacacagcagataatcttcctgtatagttcttaatataaccagttactagatgagatatagctaaagcctttgctagtttttcatcagattgtgggaattttttattataagcaacgattggaagaattgctgttaatccatgatttccacttccatttgaactcataacaggcatttttacgcctgccattcttgcatctgaagctccagcagttaacatcattgcataatttataacatcattacctaaaagaccttcttctatagactttttaattccatatccgacaccaataccagttttttgttttaatccatattcagccatctcttcattcatttttactccatctagtaaaaattctatatctttaaaatcaatttcttctacattttttattaattcttgtatagttactgtatccattaaactttcagctttttctgccgcatcatttgaagctgatacttttggttcattgtctaataatacttctccatctttttctaagaacgtaaaattatcatgtttagttcttattctcactttagcaatatgattttttccttttaacacaacttctataaatactttctctcttgtatcagcaggtgttattgatagtggagtattatccatataatcctcagctattttaacttcttcttttgttagagtttctaacacacttaatccattttcagaatggccacctactatacctagagctgctgcaatttttaatcctaatctttcagtacctggtatacctacgcacatgccatttttgtagatactaggactaactaacatacgattttcaactatttcttctcctaataattcctttgcctttgcacatgctagagctaaggctactggttcagtacaccctactgctggtttaacttctgcctttaacatttccactaattcttttcttatatctctcattatatataaacctcccaattaagtttagatttagtactcaaataattaattaaataatttcttatctatatttatagcaaaatacatgccatattttttatatctttttatatttttagtcttatattctataaccattggtatgactgcttctatttatgtattttttttatttacatagagtatttatattctttaaaatggagaaacatatgacaatttcgcaaaaagacaaaaaaaagtctcagaatgagattctatatcattttgagacggctcaaatgtgttattttttaacttataaaaaccattttttaattcataaaaaaagattatgcaaaacacttatagtataagtttaaagctttctttaaagttatgaatttagaaaaatttaaattttatatagctttttattatattactatgaaattatattgtatttttcaatttttctatataatgtagctcttgatattccaagtgctttagctgttaattctttatcttttttataatctttgtacttatttaaagcttttattatctcaatcttctctagttcatcaagtggaattatcctatcgcttttaacttctaactcttctacagaggtattcttaattttttgaggaattacattcattgtgattattgaagaagaagacatattcacactatattcaataatattctgcaactctcttatattccctggccacttatattccatcatagcatcaacaaccctgctatctatgtcaataacatttttatctaatttttttgaatactctttaaccatatgcttgattataagtgggatatcttcttttctctctcttaaacttggtaattttataggtataacatttaatctataatataaatcttctctaaaagtgccattttgaaccattttttctaaatctttatttgtagcagcaataattcttacatctattgagacatttgatttacttccaattttattaagttccttttcttgtaatactctcaataactttgactgtaaatgcaaactcatatctcctatttcatctaaaaatatacttcccttatgagctacttcaaacattccaagctttccaccttttttagctccagtaaaagctccctcttcatatccaaataattcactctctaataaattgtctggtatagcagcacagtttacagctataaaaggattatctactctattgctatggttgtgtatggctcttgcaaatagctccttacccgttccactttccccagtaataagtactgttgatgttgatttagaagctattagggcttcctttttagaatttcttatagctacactttctccaattatgttttccaattttattctataatctttattcatcttattgtagttttttatagcatctcttttatctataaaatcaataacatatccctttaactcattttttaatactattttattgatgttgtatattcccttcgaatcatatccgtatcttttataaaaaaaactacacgatttgtctttcttaaagttatttatagaaggtttctttataaaatctaattcgacaaatatgtttttgccagttatactatcctttatattgaaaagctctttaaattttgaattatatttatcaatttttccatccacatcaatagacacaacagctttgtccatattgtttaatagtgtctctaattttttcttttctaattcaagctcataagttttaatttgtgcttttaatttattagatattaagtctgccattttgcctaaaaagtttataagaccacttttattattttctataatttgtgcttgttcttttgtaaaggctataaggcctataacgccatgagaatcgccatcacatataataggacaacacacctctgcaaactctacacaagccccacttttatagcattccctacatacatcactactctttgggtcatcaattagtattgtgatctgttctgtaagtgattttttaaaagccgtatatttatctactttctcacctattttgtctatatatactcctgtacctgcaatcctaaataactccttatttactatagttacatctatattgagtactgatactatagcttcagctatattttgaatatcagattttatatattctaaacctatcataaccatcattccttatttttctttaacataagtatttgtcttatttctttaagaatcaagtatatcttatttaaagtaaattggattgacatcaggattacaaagagcataacaattattattaactcataatttatttccatctaaacatctccttataacaaaagactaggcttaacctagtcttttatattatatccatatttatattttaactcatttatcttctttttcccacataaatatattttaatttatttgactctttaatcataccatcaaagtttaatcttgaaaatatattaaatacttcatgtggatagtgaatctttgcaacagaaccacaaaatttatgtttaagataatttaacttaacttttaaattctttaaatttaaatcctctaatataacctctccattgccctttaacactctttgtatttcagatgaagctttttcacaatctgtaataacattaaattggtcaactattattatcttgttgaactgattatcatcaaatggtagaaactctaacttacctttaactacattgcaattttcattatacactagagaataacagacatcttcataattactattctccagtatagttacagaagttccaagacctctcaatctcttgcctaggtttcctatatgaccaacaagcaatattttatcacctacattatactcaattgtatccaaaaaacattctaattcatcagatgtatatttagctttaactggctgtttatttatctgacataatatgcttttcacaatgcttcacctcttcatttcctcaattataaattatgtacagattacattataataaatggcgagcaactattcaagagatatttcattagtatttttttaaacaatctttatacattttaatatgatattataccaaatttattaggattttattcataaaaatcagtctattttttatgtttattcattgttattttcatccaatttttttattttcgatatggatacttcatatgccatttttttgaccacattattttcatctatttttttctcatattctctactttgaaccctaccccaaagctgtattctatcaccaacctttagattctttgcaaatttagcatttctaccccaaactattgatggtatataatcagatttattataaggtctgtttatagcaactaataaatcggttatttcccttcctaaaggtgtcttcctatacacaggttccttacatacatatccatctaaaaatatactattagggtctttattttcctcgtctatgctttttatttctctgacaaacactgtaagcactaatctatttttattatttaatgttttgttatatgatcttaattggcctacgacattgactaaattttgtttatcaaggtcaatatcttggagaagtctttctgatacagtcattggaagtatatcaaaagaatcgcttagtctgtttatttttattttcatattataaaatttttctccaaatatctcatggctaaattctagcttattgtctaactcccctcttaagtttactacgttattctcatctttaacagctatcatattttatccctccacaattgttaattcttatatttctggtatcagcttatataataaatatatttataagggatgtattttattacaaatctttgattgctgtttaaaagtttttatttagttataaatttcatttaatatttcacttttataattataaaattattatctttttgtactacatatactaattaaactacctatttcagttttgtattaattataaaaatcctattatataattaataagtcatatataacttaaatttattcactctatataagcaacttcaacgaattaaatttattcaaataattcagatgaatattgagtcattataaacttatttttcttaattataagttatattagacttattacagcttatatttttattaatctgtattaatatatgaacatttattgaacttattgattataaaatttaaatatttagctttaaattatgctttattctttgaaaatacaacgttttttacattaaatctactaaatcactatatatattacataattggcatgttaattgctttatattaatttagcaaataaaaaactgccctaaaatattaattcaatattttaaagcagtttataatctttattattagctgtaatatttaataaacactaagtagtctttaactaagcagtctttttgtttttatttgcagccattatcattgtagcagaagtataagctataactactattactaatgcttttaatatatccattggtagagtttttactatatatgcagctacgaaaactcctattaaaccacatatagctattataactgatgcttttttagtatatgcatcttcttttataaatttcatacttgcaactggcattaataatgcacaagaacccataactattgggaatgcaacttttgcagacattcctaagaaataaaccattgccatacctggagcatatagacctataccagctgtcattaaagctcctagtataaagttacctattacacctattaccaatttaacaccagtaagacctaattcatttcctccacctggtaatacgttaatccaaggatgacctaataacattaatattgctgttaatgctaaagttacacccataacaagttgtatttttctctcgtccatcttagctattattcctgcacctatatatgaaccaactgctgctgccacaaccatagatactaaagtaacaccatcaactggtatgattgatgtaaatatgaatgcttctgtaacaactggaatagtatgtgctacgtttaatgtaccaggcatttttttatctggtatatttaactttaaagcctttgacattgctattgttggagcaaatgaccctattcctaatgtatcaaagaagtctgttataaatcctgttacagcaacttttggagtactttgttcttctagtttcccctctttgtttgctttagctacgtctttaccaaacacaactgcaaagattgctgcgaatactacatataatgcctttaagattgctaccataatccatcctcctatttttttattttttcatatattctgaatcttatagcctaaaagctatagaatagcaaccgacaagtggctactattctattttaatttcctaatttatttattacttatttaagaataaatccatgtttaagtgggtcttcttcatctattacaaaatgattaaatccagttatataagcagaaccagttattttaggtactacagcattgaaatctgcaactttagtttcttcaactatttcacctttgaataaagttcctaatatactttcatatacgaatttttctcctacttttaattcacctttagcatgtaaagtagctaatttagcacttgttccagttccacatggagatctgtcaacttgaccttgaccaaatataactacatttttgtaagtagcttctggatgagttggctcatcatatatttcaactaagtctacagtttttatatgagctaaagttggatgttgtatttctattttctcatttattatatctctaagtttcatagctagttcagttaatttaccagcattttgaggttcgatttttaaacctaattgacttgcatgtattatagcaaagaagcttccaccaaatgatatgtcaaatttaacagtcccaacacctggtaagtcaacttcaacaccttctttatataagaaagctggtacgtttaagaatgatacttctttagcttttccatctacaactgtaacgtctcctcttattattcctgctggagcttccataactacatgagttacaggctctactgctggaactacacctgtttctatagctgctgtcatagctcctattgtaccatggccacacatgttaaggtatccaccaccatccatgaagattattccaaagtcagcatctgggcaacaaggttgagtcattacagaaccaaacatatcattatgtcctcttggctctaacattatagcagttcttaaataatctagattttcctctaaatattcttttttctcaggcatagaatttccttttatgttaggtattccacctacaactattctagttgcttcacctgctgtatgagagtctatagcttgtatacttctgctaaatttcatatcaaattcccccttaggtttattttgcgtctttacgcatttttaattttaggaaagccaatgcttttttaacatcaacttcatccatgtgattgtctccaactacttctgtttctatgtagcctgttgtctttttataatcaattatggtagctttatccaaatatggattggtaattactaatccatctgctcccataatagtaagacctactgcaggtatatctgattttacaaactctgctatagcatttgtaaaatcaatgtgctggtttcctgccatatctaaagttataatcactccatcaggtcgcaatgattcaatccatcttccaagtctagttgctaaaaatgttttccattcattgtgctctgatgtcccaactacaaccactcctaacaagtctatgtcagaatcattatctatcaaatctagtaacgggtctctaaatatatgaagtgatgtgtttttcattgatgtagaaattcccacaaaactcattcccttacttaaattttttatccatgttttctcattttaagttttaaaaatgctaaagcttttttagcatctatttcatttgtgttgttttctccaactacttctgtctcaataccttcctttgatttgttcatatcaactatggtatccatatattgattgcttacaacaaacttagcttgagtcccattaaatgtaactccaactacaggtatatctctttttcctatttcctcaaatgtgttagcgtagtcaacatgtgagtttccccaaccatctgatgaaactatagctccatctactctcatggcttccagccaagcggccgttctttgtcccacaaaggttttattttcatttccatctggagttcctactactattactccaagtaaatctacatccttatcactttcaactatgtctaaaagtgggtctctaaagtgatgaagagatgtttcttttgttgaaggtcctattcccataatatccacctctcttaagtcatagctctaagggcaccatctctgtattcattaggagatataatcataggtacatttcccatatctataattgatgttcctccttcaaatccactaggttcctttgagaataactgattgtcatacatagcaccttgacctgctatttgttttactatgacaaccttttttgcatttggtcgaattttgtcaaaatattcacgaacttgagtagcatttcttccgtcttccattttcaaagacgctcttatttcttgtataaaatcatcacatgctctgaatgctgcaagtggaagtgttctttcaaaaggtaaacctccctttaaagttacatctacatggattatataatcttcaactgatggagttccatatctcccaaataccatttggtctttcaaaattccttctgaagaaccaaattcatgcatttgatttccatcttcatctgcaccagttaacattacatatacacccgttaaagtatgtgtgataccctctcccagtctgcctaaaacttttgttgatattggtataatgtccataatagtattaatttctctatcataatctccaggttttataatgtctacttttatgtctgttattaactcttctctttcttttatttcatctatacttgataaatctattgtaagtacatctttctttatagaagtttttgaaccgaaattaacttcattcatatgaaacggttttataacaagtcttctcattattttttcttccataatatccacctttgttcttaaaacccctctcctaaccgtgtaggagaagggttctatattttcaaatataaattacattttaaacgtgagctttatattcgtatggtaatggaactatcttaccagcagatggtattgcaactaattgctctaatgtatctcttaatatatgtgtttgcatttctatattatgtggttcaccagcattagcacccattggaactaatggagcaactgctctaggagttccgttttgtctaactactggaggaagagctgctattattattgtaggtattccagcttcctctattgctctctgcacgatcacggcagttctatggcaagtacctcagccagctgtcataactacaccgtctactccctcttccttaagtttagcagcgatagcaggaccagtttcttcagtgaagacatgttggtttcctccaccacccatgaatgcatagtgcataggagctactcctttgataaatccttctgcagctaattcatgtaatctatctatagggaacatacagtttatatctttgtttacatctccattgtcatatccaccatgtgataccatcatttcatcaactgtagctgtattaggtatagctctaaatgtagtatctcctgctagattaaatctcttgtcagattttaaatgaacaccagctgctgtagctaaagctatagtcatatcttttaattctttagttacaggagtccaaactggaggaggtgttattggaacgaatatttcagattgaagtccttgtactgttgtaaggctcatatatttcctctcccttctattttcaaacgattatttattatttttcttcttgttttgattgcatttctgcttgtttttctttttctctcctaatattttctacatactcttgattaggctctggacttaatacctcaggatagcttagcatgaatccaacttcttgacctatcttaagttcgtagtcagttataagcattctattaggtattttaaattgtccaagtctaccttttaggtctatagtcactccaccacctttgatgtcaactataataccttcataaaaagtctctgatgagatatattttaacctatccattataattctacctctctatactgttttaaacttggatctaaatttatgttattgtctaaatcttagttagtatctaaattttagttttcgtctttttcgtatatttctcttctcttcttactcattggtagagattgctcattctcttctaatactattttttctcctgtaactttttctatagcttctatgttatttaatttaacatttggattccattttctttcaggagctttaacttctacaccttctatagcatttttaagcatagccattattctaacagcatcttctggagctaaagtgttgttagataatatttcattctctataccttgcttagacttattgttgtctaccatgtgagtcatgtatttattaccaacaactagagcaccttgaacagctgagaaacttacaccaactactggtatacctctcatacctatttgctctatgtgagatgcgaaatctatatggttgtttccgaaaccttcagtagttactacagctccatcaacttccatagcttcaactaacatacctaatctcttagatacatagaatttctcagcatttacttgtggagaaccaacaaatacaacacctactaaatctatttcttcgtcttccatagctcttattactaatggctctctccagtaatgtcttgacatttcttttgatgcaggtcctatacaagttaatgcatggataccaccatctaatacttcaagtggagataatacaactggcatgtttcctaagtcaacgtttggttgagctcctaatgtaccaactggctcaactggtaatattaggttatcatgcattgcaccttgtcccattatttcttttataacaacaactttctttttaccttctcttctgtattgctctattacttcttcatcaactactaaagagttgtcaactttctttaatgcttctcttatttcttgagttacatagtcaaatgcacggtgagcagctaaaggtcctggtctttccatgttagttcctgcttttattgttacttgacctttgatgaatatttcacctttgtcagcagcacctggtctaccccacattatagtagtatttaactcaccttctgaagaaccaaattcacctatttgaactccatcttcatctgtaccagttaataccattacagctccatctataactctagttatacctgaacctaattcgccttcttctttagtagcgattggttgtatatctaatacagcttcactgtaagtttcatatttatcaggagttattatttctaacttcatatctacaactaactcttgagtttcattagcttctttacatatttcttctgcgtttctgatgtataaagtagttccttctattttagtttcatcagcaaattcaactttatctattttaaagtgttttttagttaagcttcttaaaagtttcttttcttcaacttttggagctacttctgctgctgcacttgccactggagcagcaacgtttgctactggagcagcaactcctgcttgaccagctactgataaaggtatctctaagcttatgttcttaccttcacctatgtgtattttaactgtttcacctgcaactcctgtgcttactggaactactgctgcttctgatactggagctgcttcttctactgtttcttctactacttcttctttagcctctcctgctttgtatccttctacgttatctgtagtcattggagaaagtgcatctaaagtttcttttaacttagctcctagtacttgacctatagttaatccattttctggtattgttaataatccagaatcctctaagtctgcaaatattgctggatcttctaagttttctggcgctataattgttcccgcttcaaatctacaacaacaaactgctgggtcatttgcatgggcttgagctgtttctaaagttattgacatagtataaaatacctccttacattattttcttatttattattttaaatctcaattcctcaacaggtaaccccttaactgagaaattaagtaaattaaaacctacataatttgttatgattaatattatttttttctcactcaaagtcactttatattataagcaattcctatgccaacttattaacaaaaagattttttctataatagattcttcatctatcgctatttttagccaaatattatataaatatttatttaaaatatgttattttttgtatttgtaaacattttctcaaacaaaaaaagtgtcaattaatcaacactttttcattttttttaacacatctatatacacaacacttatacaagtgttggctttactaggttttaaattaaagtttatcattttgtcaaaatttagtcatatgtcatattttagacacatctattttgtattggtctatcttataatacaaagttgttctgggtatatttaatatcttagctgctttagctttatttccattagacattttaagtgccttggttatattctttatttcaattttttgagttgccttcgttaaatctaagggatactcttcttcttcagtactattatttgtagaatccatcatataacttggtacatcatctacatctattttagaattttgtgacaatacaacaatattttcaatcgtattttttaattctctaatattacctttccatctataattctgaaatatatctattacatctttgctaattgtaagaacaggcttattattttgtttacatatctcctctaaaaagctatgaaccaataatcctatgtcttcttttctctctctaagtggaggaatctttatttcaacaacatttaatctatagtataaatcttctctaaatttttctgcctttaccattttactcaaatctttattggtagctgatattattctaggatttatttttattgtggtatctccaccaactcttcttatttctttttcctgtaatactctaagcaactttgcttgcatactaagaggtaaatcggcaatttcatctaaaaatacagttccatcttttgcaagttcaaatatacctattcgaccctttttacttgctcctgtaaatgcacctgattcatacccaaaaaactcactttcaaataactcatttggtatggcactacagttaacaggtataaattgaccttttctctcactataatcatgaatagctcttgcaaatacttctttacccgtaccactttcaccccaaataaatatgctactatttgttctagccacttgttttgcaatcgctttcgatttttccaatttataacttttacctaaaatcttatcaaaactacctttagataaatttttgacttcgttctttagatattttaatgtatcatttactttttcaagttcaagagctaatatcttagcttctgtaacatcaacttctgtacatacaacaccgataaattcttctttataaaatataggatttgcatgaactaatgcatacatattttcttttttatctgtaaaatacaagtcactcattccaactttactatttagtactttttctgaaatagtattttccaaaaattcattcatcggtcgaccaactatatcttcagactttatatcatacctttcctccataaacttattccacaagataacaacaccttcgttatttatagcacaaattccttctttaatttgacctataatatacttcaaagtcaatccataatcttctaaatgcatatatagatagtccctaatgtgctcttgttttagaactccaataattttattatctctaagaacaggaagaatccctatattttttaatatcattatatctctacattcatctaaggttaaaccttcgttgacatatattacatccttcttcattataagttttactggttgaccttcatactttttatgcatctcataaagattatgtatatccgtcatggatataatgccttttaattggtcagatgaatctattaccattagagtttttgtgttgctttttatcatttcttttattgcatcttcaattcttgtgtcttcgtctatagttgtaaattttgtatccattacctcttctactttttttacttctggtatcgaaaacataaagtccccccctttatagtagtacctcatcaaaacttatttatatatatttattctagcatattataataattatttattaaataattattattaaaatttattaagtaattagcatttaaatttatataatcactttaaaatttataattaaatttatacaaatgaaatcaaatgaattatacccttagtatattattttttcaatactattttcaccttcaaaacatttttctattcatcaaacaattaatgaatgcctgtatccaatcataaatttaagaatataattaaaatagatatttttaaacaaactatatttgcatattatatttacataaaaaagtcccaaaatgacttataaatcaatttgagactttttattttaaacttaataataatataaattaatttctttttataaattaaggcgtaaaaccactatacctttaggttggtggatgtaaacctatcccttactttgtatgtatttttcaatcatttctttagaaacatttcctacactgaaagcaaagtatccatctgagcaaaaagttttttctgtatttacatacaaatatcaaatgtaccaataacaaacacttagaatggtttctactaacataattcacaactccaattcaatcccttcttaaatatatatggtttaattagttttacatttggcacttttttgatttcttttaaagctatatattgccctcaaaatacattaaaaaacatccttagaagtaatttttaagttttacttctaaagatgtctaacttctatttatctattattttatttttaatcttacgtcaccttttattcttcttattaatgggtgattaactgttctcattacatggtcagtaatatgatatacacctaactttaattttggtgcagaacccattactgtgttactacagtcagtacagtttcctattaatataacttctgctccagctttcttaaattcaatacatttttgagcttgtcctggacagtgtcctggattttcacattttaatgcacctttaatttcttgagcttgtttacatttttgaactgatactatatcagtaactcccattttagttgctatatctctcattctctcttcattaggtccacatgcacagactaaaagacccatttttctcttttcattaacaaatggcatagtaactattataccaccactagttttagttattggagcatctaaagtagtagctttaccagtgaaaggtcctcctaggattatttcaccatattcaccttttattccaccagctctttcaattaattctccgacagttgttccaattggcacatcttcaaatactatagactcttttccactgtttaattgaccaactacagttatatttttagatataactggtcttttttgctcaacagcctctactattctagttagtgtttctacgtttattactactgcattagcctctgaaggtaattgagttggctcaagtaattttcctagaacgtctcttactattgctctctcttctcccattgggtacatatcaactagttctgcaacttctatgttgtctcctggctttattacttttttgaaagcttctattgcttttggatgcttgctttttattgctagcataccttttccagcattagtaacttccatagcatattttataccttgataaactatttctggtctttcttctatttcttttatattatgagctaataaaggttcacattcagctgcatttgctaatattgttccaccatttaaatctatgtttaattttacatgagtagggaatcctgctccacccattcctactactccagcttctttaattaagtcaagtataccttctccttttaatggttcaaaagtatcttcttgtacttcatcagcttcaattactatcgcttggtcatttatttcacttatttttccactaacactggcataaatatttgcccctaatccagttggttctgcgattagagttcctttttttactacatctccaacacttactactggcttatctggaccaccaacgtgttgttttaataaaatagaatatagtttgttcaactagtacgcccccttaagtatattaatttttttataagctgttcaaataatgttaatgctatttttctattataaggtcttaacatattgtttatttctatagaacatatcgcttattaacaaagcaatttctatgccaacttttaaacaaacttataccctttggaaatactgtcttacagcattcattaattcttctaaatttttaaatccatcaaaaaaaagtcaattattagacacttttttaatcaatttaatctataattattgatattgcatacatgtataaaaagtgtcaaaaaatagacaccgtctttttatcgacacttttctaacatatactatataatttatcacaactttacttaaaatatacatttattacttattaattcttagttttttgcactccattggaatcaactacataattatctttatacaacaaatcagatattttgactagactgtatccatctttttttagtcgacttattatagtatccaaatagttatctacatcatttatattagcatggaataaaactattgaaccaggttgagattcttttattactttctcaattacatgatttggtccaagctccttccaatctatagaatctacatcccacttaattactttataacctaaatcactacaaatgtccatagctttattgtttacgtccccaaaaggaggtctaaataaattagtcttttttcctgttatattatatattttttctgatgtagtttctatctcttttgttatgtcttcttttgatatttccttcaaattggcatgagtgtttgaatgatttccaatttcatgtcctttttcatctatagcttttacaatttcttcattatcatccacccaactaccaactaaaaagaaggtagcttttacattatgtttatctaaaatttttaaaatatcatccatattatcagttccccatgctacatcaaaactcaaggctatttttttctcatttgtatcaactttatatataggcatttttgaattgtcgtatttagaacatatgtattttattccataaacaaaaacaaatattaacactaataataatgaaaaaaataaaacactatatatcaaagctttagtccttttaacttctcttttcatactattccccctttgaaataatttcttctatatttaaaatttattttttttcagctcaaaaaagtactgtaatatttaatttataagacaataactaaaaaaataaaacctatattgacctaattaaactctctaaaatactcatttatttaatttttttatattttttacatttttacctttatttttctgtatatattatttttattttggagaaattagtattaacatcacataaataaaagtgttgttagacatcataaactaattatttgaggaggaaatttactatgtcaaattcaaacagaacagtagttccagaagcaaaagctgctttaaaccaaatgaaattagaaatagctaacgaaataggtttatctaactatgaaaacatagataaaggtaacttaacagctagagaaaatggatatgttggtggatatatgactaagaaattagttgaaatggctgaaagacaaatggctggaaaataaatagtaaattttgacacctgggtatcaacagggctgctaattagcagccctgtttctctatatttatttataaaattgttttatatgaattattaaagattaataatacaatacaaattgttcttttaattttgtacaaattagtttaatatattatatatagaaatagtttgacggaggatgatatttatgtttgaaaactcgtctgaagaattagcctatcacaaacttttaattttatatatattagaaaaaattaaaatggatttaactaattctcaaataactcaagtagtattagagactgagatgatgaattatttttcattacaacagcttttatctcagcttatggaatctaagtttttgactacatataaagactctgacagagaatattatgctcttactcaaagaggcgtagaaagtctagaatacttctttaatcgaatacctactagtgttactgaaaaaatagacaagtatatagattctaacaaagaaaatctactagcagatactcaagtaaagtctagttttgtaaaacaaagtgataatgaatttattgtcaaccttagagtcatagaaaatcagtctaacttaatagatttaaatctaaatgtttcatcagagaaacaagcaaaacttatttgcaataactggaaaaataatgcatcttatatgtatgccgaagttatcgatttacttataagagacatacattaaagcctacaaacaaattatagttgtaggctcttttcctaccttgatttcttttattaatttattgtttgcagtttcataaacttttactgaattttcttgtgtatctgatacaaatagtagcttttcatctttagatatttctaagccttgaggaatcccatttatttcaatatttccaatgtatctactcgttgtataatctaaaattcttacattattataacccaaatcagcaacataaacttttttgccactataattaaatcttatttctactggtaataaaaattcatataataccttttttatatccatgcttacttcatctattattataagctttccatcaagtgttgatatatacatttctttcttttgtttatcaagctctatatgccaagctctaaagtccatatttattttcttttgtatatttttattaattgtatctatacatactatcgagtttatacacggtacatataattttttactttctctatcaaagtcaaatccatgtggcatattatcaactccaataattcctattggatttaatgtgtttttatctagtacatatatactattagaatcttcatttgccacaaacaattcattatcactaagtacaacttgactaagacttcctcctatagagacagtatcaattattttatcattacttaaatctaagacataaagtatcccattacttgaactaggtatgtatattaaatttttttctttttctatgcaaaaatggtgtggatatatattatcttctaatactatttctttttctagttcaagtgtagaataatcaactatgctaatactctttgataagtagttagaaatatagattttcatataacccctcctctctacaatacatatactacaataatatattatttcattagcttgtattatgctttatagttgcattattacgcatatatttggtattattattattgttaaaaaaagaaataatatttaatggaggtctttttaatgaaagtaacatttaatccaagtggtgtatgttgtagagaaatgatttttgaagttgatgaaaataatgtgattgttgatgctgagtttataggaggatgtaatggtaatttatcaggacttagaagcttaataatcggccaaaatgctcttgaagttgctgataaattaaacggtattgactgtggtggaaaaggtacttcttgcccagaccaattatctaaggctatacgtcaatctatataattacttatataaacatcagtaaaattattaaaaacttactttatataaaaagagttgtccattttttagacaactcttttttatatctttatttgtatatttattttataaaattataatttctttactaaagttctcactgtaccaatcatatataatgaacctgcacttattataatatcatcctcacttgatgtttctaatgtataatttactgcatcctctatctcatgctttgatgttacatcatctacatattttaatactttttctcttaatatatctgaatttatggcccttgggttatttggtgttgttgttattaccttattaaaatgtggcaacaatatctctaaaacactatcaatatctttatcttctaacatacctattaataaggttaattttctacctttaaaattcttatcaagtgcttttgccaaagattttgctccatcttcattatgtgcaccatctattataaaaattggattttcttttatcttttctattcttcctggccatttagtatttataagtccttttcttatagattcttcatttatatttgctaatttatttatgtcttttagatattttattacactaattgccaagatagaattgtttatttgatgttcacctatcaattttatttcaaggtctctataagtttctttcattacagtacaatcgtatatttgagaatttatatctgatttttttatgtttatatcatcaaaatcaacttctatatatttagcttttttctctttacaaactgactttataacatccttcgcttcatcagtctggtcatatactagtactactccattttcctttattattccagccttttcgtacgctattttttctattgtatctccaagtatacctgtatggtccaaacttatagatactatcacacttacaagtgattttgttattatatttgtagcatcatatctgccacctaaaccaacttctaatgccacaaagtctaccttttgttctgaatagtaataaaatgccattgcagtaaccacttcaaattctgttggatatgcatagccttcttttaccataatctctattttttcttttattaactcaattattctagcaacatcatcctgtggtatattttgtccatttactcttatacgctcagtaaaagtttctaaatatggagatgtatataaaccaactttatatccacactctcttagtatattagaaacaaaagaacacacagaaccttttccattagttccagctacatgtattatattcaaagtttcttgtggatttcctaataattctaataactttccgatattttctaatcctaatcttataccgaatttattagtttgtgatatgtactctaatgcttcttcatatttcattatctaactccccctgtattggcattttctcttatgctatctaattatagtatattttttacttttaatctaccgacaaagaatacatataatttaataccttctacattaaatttagctacaaatctttatttataagtttttatatctttccactaattcagtcagtgtatatattgaaactaagtcatattttgagatgtccatataattaaactttatgtcaaatctatgctctagctttttcaacagattaaaacaattatcataaaccaaacctatctccttattaaaaaggctacccttaaagagtttttcattattatcttcaatatctaaacaatccctaacaacgtcagcaactttcataagaagagcattttctttgtcatacaaatccaatttaaagtttacaattctactacactcatcaaaatcacaactatcccaatgatttctagttgctaatgattcaagcttatcatttaaatcagatattgttatgcctggtttttctgataatatcttagctattttaccagtaagctttgctgataaataactattacattttggtggtaatctataggaattatttatatcacaacttatatatgaattgctatccataacacattgaacatcatattttttgttgtaccaaaatgaatcatctccatctaaagtaaatcctcttacacctataacattgttaaacatagctggataacttaaatcaaaatcattagcgagtgaacatactattatttttccttttctaaacaattcgtaacaaacttcaaataagcccttaacactctctactcctatgactgataaacttaaattaattaatcttatgttagtgtctaaaaggtatcttaatgcttcttcaagaacttttatatttgtaataccatcttttctcaaaatttttattacaaataactctacatcttcatactctttctttattattgatgcacaagcagttccatgaccatcttcatcatcaaatttatctgatataaagatataatcatgcatacattcaaaagcaattcctccaactaaattatcttttaagtaatcatgttctttgtctattcctgtatctaatactgcaaccttaactttattattcatatcacatatattctccattacaaaagtttttaatatatctatgttaatagttcatcttaaactttgatttaagttgcacaatttatcttttaaatgctatatttcttgctaaaaacataaaataagtacaccatatatttaatttatatttattatatcaattattatcattaaatggttaaatgttaagataaaatttttagatttatatcacaatttaggattatttgtaaaaaaggagattatctttttattagacaatccccttgtatattttattaatatttatctatgattaagcatcaattttattttatactttttgattttaatactatatatctaaatcttatttagggggaacaattatttatatgatataaaaatgctaatttgaatgaacttgtcttataatcagttttataaaatacaccattctacaaagtatgaatcaaaaggtgaaaaaatactaaaaataataaatcaacatcaattttaaccaatatatgaaaaacttataccaagtatgcataaaaactaatataaatattattttaacaactaatacttacacctttatatattatatcatatttcaataaataaattgcataaaaggaaatcttttcatagaattaaaccatttattaattcattactataggttcaataaactataagatgtcgctttaatatttatattatactccattaaatattaatataattaattaaagtatgcatagctaaatgaaacaaatatctatagagttttataaatagtcattattttaaaaaggtaatcatattctaaaaatacatataatgcatataaaaatcaataatagtatattaataatcaggctactaattaataatcatgctactgtaatggaaactctacatatacatattaaacaatattaaaagtctataaactgatattttgcataataaaactgtcttaatataaataacattttatatattaagacagttttaatcaatagccctgtgatgacattaaatcttttttacgatattttcaattacctttttaaaattaatacattatatcacataacaagcttgttaatgctacttttaaatctttaagtctatacttacttataggtataaattgttcattaatagtaatcatattatccctaagatcttctattcttcttaaattaacaataaaacttgtatgacatctaaaaaagccattttcacacagtaatttttctgcttgtttcatgctcatattagctttataatctctacctattgtatgtacaactaaatctctctttacagtttcaacatataaaatagaatctatcagtattctattaaatccttttttactatttaaaactatataacgctccttctttctttgaaggttatcaatacaaagatttacacccattgcaaagttactatactctataggctttactaaatatctataagcacgaacctcataaccttggggggcatactctgaaaaagctgttgtaaatataatttctactttttcatcaaactttcttatttttttagccacctcaattccattgatatctttcatttggatatctaaaaatataatatcaattttttctgggtatttggatattaaatcttctccacaggaaaattccagtatttgataatttagacatctttcagacaaaagtttttttgtaaactcttttagtatgcttctttgtattttttcgtcatcacatataactaccctgaacataatatcacctccaaatctaaaatatcatttagtttactttatttcaatttccaaactgtactcactagctttcaaatttaaatttctttataaatttaagttgtcgattaaactacttatagaaattctctttaatatttaaacttaaattacgataaattcctatacttttctagatatattatgtaaaaaaatatagtaaaataaatataatatgtatttattaccctatattaaacatcataatatatcaaatttttattgcttataaattttaagacataaaattcatatattcacaacataaaataaaaatataacacatctgtaaagaattataacatcatatttgtatatatataaagaaaaacatacaaaaagtatagaatatatactttttgtatgtttttactaattcttatatttattttattttagattctaaatttgttaatctttcctcaacagatttaatcatctcttcaaatttttctttttttactttttcttcttcaattaaactttcaggagcttttgctaagaaaccttgatttgcaagctttccattaactctctttatttcgccttctaactttttcttttctttagacaatctctcaatttctttttcaaaatcaactaattcattaagaggtataaatatttcaacaccatcaataactactccaactgcatcttctggaacattagatttatcttttgctatctctacatttgaagcagatgctagagttataaaatagtctttaccaagctcaatagcttctattttttcttcacttgggattattatcaatttagctttcttagaaggtggtacattcatttctgctctcacatttcttatacttcttataccttccatcaataagttcatcatatcttcttcttcagccatgttatcttcttcattatattttggccattcagatactattatacatccttcaacagtaggaagatgagtatatatttcctctgttataaatggcatgtatggatgtaataattttaatattttttcaagaacataagttaatgtatataatgctgcagatttagcatttgcatcttccccatataatctaggtttaaccatttcaatataccagtcacagtattctgaccaagtaaaatcgtatatcttttgaagtgctattcctaaatcaaacttatccatgttattagttgcttcttttacaatattatttgctcttgatattatccatttatcagctagagttaagtcctctttaacactttctctagtcatgtttttaattatatcttcatcaatattcataaatacaaatcttgatgcattccacaacttatttgcaaagtttctagcaaattctactctttccatatagaatctcatatcatttcctggggaatttccagttgttaatgtaaatcttagggcatcagctccatattgctcgattatctccaatgggtctataccatttcctaaagatttactcatttttctaccttgagaatctcttactaatccatgaaccaaaacatggtcaaatggcttttcattcatacagaacatacctgcaaatgccattctaactacccagaagaatattatatcgtatcctgtaacaagtacacttgttggataataataatctaaagcttcagtcttatttggccatcctagagtagagaaaggccataatgcagaactgaaccaagtatctaaggcatcttcatcttgtttaaaatgagtgcttccacatttaggacacttatctggcatttttctagcaactactatttctccacactcttgacaataataagctggtatttgatgaccccaccataattgtcttgatatacaccaatctcttatattttctagccattgtaaataagttttatcaaatttatctggaacaaattctaattctccttttttaagaatatctatagctggttttgcaagttcttccatcttaacaaaccattgctctgataatctaggctcaactactgtatggcatctataacaagttcctacattatgattatgcgcttttatcttaattaggtaaccttgttcttttaagtctgctacgatagcttttctacactcaaatctatccataccttcatattttccacaaacttcattcatagttccatcttcattcatagtatttaactgctcaagattatgtcttaatcctacttcaaaatcattagggtcatgtgctggagtcatcttaactgcaccagttccaaactctaaatcaacataactatctgcaactattggaagttctcttcctactaatggaagtattgctgtttttcctattaaatgtttatatctatcatcttctggatttactgctataccagtatctcctatcattgtctcaggtctagttgtagctatttctaaaaagtcttcactatcttttagtgggtactttatatgataaaagtttccgtcgtgttcttcatgttcaacttctgcatctgataaagtagttttgcaatctgggcaccagtttattattctatttcctctgtatatgtgacctttttcatataggcttacaaaaaattctataactgcttcattacacccttcatccatagtaaatctttctttatcccaatcacaagaatcacctagttgtttaagctgattagatatttttcctccaaattcatctttccattcccaggctctctttaaaaattcttctctacctatttcatactttgtcttgccttcttgtttttttattctttcaacaactttaacttctgttgctatagaagcatggtcagttcctggaagccaaaaagcttcatatccatccatacgtttccatctgattaatatatcttgaagtgtatggtcaagagcgtgtcccatatgcaattgccctgttatatttggtggtggcatcattattgtaaatggttttttatctggatttggtttagatttaaaatacccttcatccatccattttttatatagcctagcctcaaaatcttttgggttataagtttttgataaattcgtattttccattgtcctgcctcctgtattttataaataaattttttaaatatctttagaaataaaaaagagctcttcatcctctttaaaaaggacgaaaagctcgcgttaccaccttaattccaaagcttaaaatacattaacatataattaaattattagttaatgttattttatcaactttgactctcaaagaatttaacggttctaaccgtctaaacttacttatagttcagtttagaaactccaaagctacattcagtaaatcttatacttagaaaatcttacagccagtgaattttcctctcttttagtagtatttacttactcctcttcttctcagtctttaatattacatattattatatacaaatattattctctttgtcaattatttttattttattttttctgaattttcttaattatgtctattctcttttatatagttgttatattttaaaatatgtttttacagttattctgtcttataatgtcaataattgcaagattattttattttaattttaatgctttctcattaattttatattatattatccttacagtatacctcttattcgtattttttatattatatgttttattttataaataatttactttatcttttactatatttaaatttattataagttttcttgccagaaatttttaggtgttatattttctgtaattggcaatattgtatatcctctctcttttaagattcttataatattatttaaagcatttaaactttgctctttctcatgaattaatactactaattcatctctttttcttccataatataatatattacttactatctgacttgtagaagacttccaatcctgtgtatccaaattccagtcccaaattaaataatcatttgccataagtttattatatgaaccttctggcatatatggtttacttccgtatggtaatcttattaattttgaactctgaccagttatttcttgtagagtattattgcatgtattaaattccccaactgttacttctgggcttttatataacttatgtatatcatgacttacactatgaaaacctattgagttttcctcttccaagactctccttacttcttccttgtgatttttcatattttgattaagcataaaaaatgtcgctttgacatcattttcttttaaaatatcaagtagtgcatttgtatattttgatggaccatcatctattgttatgtatgctactttttcagaagtagcccctggaccttttgtttcttcttgagatgctttgtatatgatttctcctaaagtattactttgagaaagcagttccagtgtattttcaccttttgaacttatattttcaactggaacattattaattttttcctccaataatgttccagttaaaattaaaacagctataagaaatatccttataaatacatgaaaaacagccttattatctttaattttcatcccccatatctcccttttataaaagcataagtttaagacttaaaaagttattttttatatttattctctttcttattactttttatatctctactaaatatttttttaaccttttcttcttctttttctcctaaagattctactcttttgattcccaaagaagttaaaaattgtaatacatttaaattatcaaatggagtttccatattcgtactttcactatattcatcaacattcttagtaccttcttccacacttaaaatacgcttcggacctcctacacagcctcctacacaccccattccttctataaatgtagcttctatttctttatttagaactttctttagaccgtccatgcactcttttgttccttcaaatgccttttcttcaaattttatatttttgtcaattcttctgactgataacttaactgctttacttacacctcctgttctagcataaactctacctgaaagggacgcctctactctattactctcatccattattgctggatttaactctaatgcatcaaatatttcttgcaactctttaaatgtaagcacaaaatcaactgcatcttttatatcttctaacattgcttctttcttttttgccatacaaggacctatgaatacaactttagcatctggatttaaaatttttacagctctcccacaagcaatcataggagaaacggatggtgatacattctccaatatctgaggaaaactattttgtatcaaactaacccaaataggacagcaacaactagttataaagcatccttcttcgtcctttttcatatgctcataataatcatatgcttcttttgcagtaagcatatctgctgccaaagcaacttctatcatatcttcaaatcctatcttttttaatgcagttcttaatttaccagggcttacatctttcccaaactgtcctacaaaagctggtgcaactattgcatatacagggctctttatatcttttaacaattttatcattggtataaattctattttatctgaaattgcacccaacttacatcttgatacacaatcaccacaagcactacatacatcttcctcattacaattaatatgcttacttcttatcttacatgactcatcttccttattattttcatcacaatatttgcaagcatctgatattacagatattattggtcttttgacttcatctaaatttacagcttcatgtagtgactcttttaaatttttatctgtatcttctgtcacatccaatcccatagttaccctaattaaatttaccatagtatctttatcaaattttccactaaaataattatttaaattatcctttaaatcttcatttaaaattttattaggtaagttttcaatatcctctatatcatcattccacactgcttttacaagttcgccaaaaagcttcattttatatatttctagtattttagaattgtcatttctagtattcataaaaaatagtacctccataaattaaacttatatatgtttaatatttacaaagatactattttttatttattatttaactactattattaatatgatttatttagctttctcaacaactctatttcaatcattattttcattagatgatagttgaatacggggcttttttcttcatctatattccagtctagcttatccacattatatgttttcttaaggtatttatatgtatgctctttcaaataaagtttattttcaagtaactctatagactgcatatgaaaatgtatttctctacatatccttaaggcattctcaattttttctatattagtttcactcaaactataatccaactcatcaataagttttgaatatatttcttctaatttttctacttcttcttcaaatttctctacatttaaattttcttttctaagaattttatcttcaataagtaacattgaaagttcttctatctttttaaattcatctataacactatttagataatttggtctagccacataataattaacaagtactccaaacaaaacacctacagatgtatctaacactctatgtaaagaataatacacagggtcactatttcctacacctagatgtatagccagaaaggttacacaggcaactactactgactttattttaaacagattgcataaatatattgagcacattactcctagaccacataaaaaagggtctccagctttaatgatggcaaatatgaatcctattataccacctaaaatagtaccttccactctattgattcctgtctttaaagaaccttttaccgtatcttgaacagaaattatacatgctactagagaataaaacatattctctactagatagttaccaagaatcatacataaagtgacactaattcctgtttttatagtcctcatacccatcttttgaagtttcaaagttccacctcctaaaaagcaccttatataaaatacgcatcctcatatttaatatgttcctagtatatcacaattttttaaatttacccattaatcatatttttttatcaattctttcttaatttagacaataaaaaaactgctttaaagcagttttttatcctatctcaaccattttaccctcaattgcaaaaattatcttctcacatacatttgttatatggtctccaattctttcaaggtatcttcctataagtagaagttttactccttggtctatagtatttgaattttcatgcattatttttaaacaatcaatttgtacttgttcatacaatccatctacaatatcatctttagttccaacatcataagctatacttgcatcaaataagattaaagcttctctagtctgagacatcatagacttacattcttttgccatcttaggaatatctatcagctcttttatataagcctctccacctatcttcaacatttctctagctatatttgctgcataatctcctattctttccaactctatcgatatattacctaatgaataaataaatcttaagtcccttgccattggttgctttaatactattagctctatactcttatctcttatttcttctcttaatttatttatttcttcatcatcttctactacttttcttgcaccctctaaatccttctctatcatacaagtcacagacttttctattgcttcttcacatttttccatcataagtactgtttgttcttttaaagtatcaatacttatatctaaactattattgaccattgtctaactcctttatagttatatattttaaccaaatctacctgttatatagtcttctgttcttttatctacaggagtggtaaacatagtttttgtatcgctaaattctataacctctccatttaagaaaaaagctgtttcatctgatatacgagcagcttgttgcatattatgtgtaactatgactattgtgtagtctttttttaaatcctctataagttcctctacttttaatgttgaaattgggtctaaagcagatgtaggttcatccataagaataacttctggtctcatagcaattgctcttgctatacatatacgctgttgttgaccaccagaaagtcctagtgcagatgatttaagcctgtctttaacctcatcccaaatagctgcaccttttaagctttcttctacaattttatctaattgcttcttatctcttagtccatgtgtacgaggaccatatgccacattatcatatatactcataggaaatggatttggtttttgaaataccattcctactttagtacgaagatttataacatcatctgaggtatatatgtcctctccatcaacagaaatgtttcctttaattgttacatcttcgattaagtcattcattctatttaacgttcttataaaagttgattttccgcatccagatggacctattaaagcagtaaccttattctcttttatatccatatttattttctttaatgcttgcttatcaccataaaataaatccaaatcttttacactcatttttatcttatcgattaattccattattcacacctcttaaatttaataattagctttatttaatttcttagcaacaaatcttgctagcatgtttagtgctaatacaattactattaaaacaattcctatactggctgctgttgctatatctccactctctttagtcagtaagtatgagtgtacagttaatgttcttgcactatcaaatattccacctggcatcttggctacagtacctgctgtaagtaatattgcagctgattctccaattatacgaccaactgataagattactccagataagattcctggtattgcacttggaagtactaccttatataaagtttgaaattttgtagctcctaatgccaatgatgattctctataagcttgaggaactgtttttaaagcttcttctgttgtacgaattattactggtaatattattattgcaactgtaagtgaacctgcaactatggaatatcccatttttaatgtaactacaaagaaaattcctccaaataatccatatactatagatggtatccctgataaactttcagttgcaaatcttatagctgtaactgcttttccttttttagcatattcttgtaaatatatagcagccaatattcctataggagttgctacaactatagaaactactactgtatataatgttgtaattatcattggaagtataccaccatcacctgatgctgaataattgctaaataagaaattaaaattcatgttgccaattccctttataaatataaatcccactataatgactaatgatactattgtaaatagtgctgatagatatactaatgacttcaatagattctctttgaactttctcatcttaatttaccgccttatttgaaagtttatttaaaactaagtttaaaattaatataaatgtaaacaatactactccagttgcaaataacatttcttgatgtgtaccaaatgcgtatcccatttcaagtgctatattagttgtaagtggtcttacactatctgttattgcagttggcataactggtgagtttcctgcaacaagtattactgccattgtttcacctaaagctcttcctactcctaatactactgcagctaatactccagatttcgcagcaggtagtacaactttgaatattgtttctatttttgatgcaccaagtgctaatgaaccttctttgtatgcttttggtactgctcttattgctgtttctgatacagatattattgttggtaacatcattactgctaatactattactattgctaacaaactttgaccttttggaagattaaatatactttgtatagttggaactatcactgcaagaccaaatacaccatataatactgaaggtatacctgctaaaagttcaactgctggtgacattatttttgctaatcttttaggtgctacttctgctataaatacagaggttaatataccaacaggtactcctatcacaagtgctccaagtgttgcaaatattgatgctactatcatagatgatattccaaatttattggcagaaggaacccaatctgcaccagttaaaaagtctataaatgaatatccttcaaatataaatggtcttaagcctttataaaatacgaatcctattatcaaaagtaaacttgcaactgctactaaagcactaagtagaaaaatattttttgctactttttcaattacgtattttgtcttattgccattattgtcatttttttctaaacctactaatctagattttactatcataataccctcccattaaaatatacttatcgattttcgttctgtattcaaaatttaattttttataattcgtcttcatcaaatttcctgtacttttattctactttttttaagttaaatctatattaggattaagttaagcaagtgtaaaattatatttacttttttaacattaattttacttttaaaactatatttgacatttactttacaatatactgttgtttctctatattaaaatagcagatatagataataatacagtttatgtataatttattacctatatctgctattaagatttgttaactaaatttaacttttatactacatatataattatcgtatcctctagtttatatcactattatttctatcaaattgttatgatacttgatgtttgcaataggtacgaatagccaaaaatataaaaataggtatttctatcactgagaaaaacagtataatgtgtggtgtccaaaaactcatacctcctaagtgtaagaaattaaatgatgtcatttgatataataaactaatcttaagaccaattccccctggtggtaataggtatccaatccaactaacacctattcccataggaattaagcaaatagaaaaagcaatcagcatagaagtaagagaatccttacattttgcagataaaaataatgttaaactaaccattgcaagtattgaaattagaccaccaatagctataagaatctgtgcttgtagtaaatttatatttactagactaatgacagaaaacaacatttgaaatgaggttttcaaacattcagtaccaaaagctaaatcagaaattgccaaatggatagaaatacatacaacaaacattactataaatatagaaaatagagctaatattttagtaaacgctagacgagtatgtccatgtttcgtacaacgaaggatgctatctgattgtgtctgatactcaccagaaaaagtaggtgcagtaattgcaacacatataattaataatataaaaatgtaaaatattatataatcgaaagcatctttagaataacctgggtatatctcaaatggagtatctacttttctataaagttcttgagctttcatttgtgcactggaagtttgtcgttcaatcttcataatatcatttaaatgagttttgcattgttcataaaaagaatctaaatcatttgtatttatttctgataattctgttgcaaatcctgtttctgaattagcaaatgcttcaggaagtctattcaacaatgggcgtattggtaaaatacttttagaataaatatctagtgggaaatcttcactacctactttaccatacttttcttctgtttttttccatatatttaaagcatgctttaatttttttggtgttacaactccactactaatttcactattattagcataaattgtttttttatatttaatagcatctaaaccactcaattcaactaccttgccattattatctaaataattgataccctcgtaagtaattggaagaaaagccatcaatgcagataaaaccaatgccaacaataataaaattaatgtacgacgtgagtgcaacactcgtttaatttccaaataaaaaatacgcatttatttcccctccttactataaactgcttctggaaataaccataaatataaatcttctagtcgtggttcaacagcaatagagttatcaatttgtgacttttctgccaagtaacgaatagatacttgattgtttttttcactacgctgattgattatacgtaaattcatttcatattttgaaatatctctatttgatataagacattcccatactttgccctctactttcttaaccagtttatcggttgttcccacatcaagaatttttccacttttcataatagcattttgagttgatatgtactcaatatcagatacaatgtgagtagatattaggacaacacgattatgagaaaattctgaaataaaattacgaaatctcactcgctcaccagggtcaagccctgctgttggttcatccattataaggattttagggtcatttaacatggcttgtgcaattcccactcgtcgtttcattccaccagataatttaataatctttttattttttacatcagataatgtaagaatttccaatagattattaatttttccttttacttctcttggtggtacatctttcaatgctgctatatattctaaataatcttttacagaaaaatcctgtgggaaaccaaattcttgtggtaaaaatcccagtaaatttctgtactcagcacccattatataaatattttttccattatacagaattttgccattggtaggtttcataatgtctgtaataattctcatcaaggtagttttacctgctccgtttgctcctagaaatccccacacacctggtgttaaggtaaggcaaacatcttctacagcaattttatccttaaatttttttgtcacatgttcaatttttaattccatatttgaaactcctctctttatctacttacctgcaaaaacaaaagtgtcttgcttagtatttattttactaaacaaagacactcataattttaatattaaatagataatttcttaagaaaatcctaatatttgatttatattttactaaatagatgtaggaagcgatatagtaaatgttgtgacttcatctttactttgaacagtaatatcaccaccatgcaaatttataatttccttagctatagaaagccctaaacctgcaccacccatatcagattttctagcttcatctaaacgattgaacttttcaaatatagcagaaagttgttcttctggaattgtctgtccataatttctaaaagcaatatctaccttgctgtctttatgaaccgctgagataataatttctgtattaggatagctgtaagcaatagcatttttcaagatattattaaacactcttgcaagtttttcagaatctgcttttattgttaaactttcatttgcttttagaatggctctatttcctttttcagacagcaatgggtaaaattcatcctttaattgaagtaacatataatataggtctactttttcgaaattaattttgatttgattagaattatatcgtgttatttcaaaaagttcattgataagtttttctaaatattgtgctttgtcaagtgcaacttcagtatacttagatttttgagaattatccatattaggtatttcttttaataagctcaaatacccaataactgaagtaagtggtgtccttatatcatgtgctagatacatcacaaggttattctttttattttcagcctctttcactgcttgttgacttaacaaaacagacatcttaatttggttcatttgttgctctatttcctttaatggcttagatagttcaaccaattcatcattttgttgataaatagtatgtgttgcattgatgatttctcttaaataattccatggttttttccaataaaaattgaaaatagtgatatatccaattataaaaaccaaaaaaaataatacatctcttctcaacttaagccatttaacaagaggatttgaaaaatttgaaaacgtataatcagccataaacattaaaaccaatactatacctgtatagatagctaacattatatataatttatactttaaatacgcctctgtatttttttctctttttataaatttatatttatctcttagtttcctataagtaaaattattaatctttttcataatactacatcccttcttgacaagaaaaataggtgtcaaatcttgtaaccaacaccccaaattgtttttatatattttgcttcatctacagtatcacctaatttttcacgaagatggcgaatatgaactgttatagtattgttacttttattgtaatattcatctttccagatagcatgaaaaagattttctgaatttaccacagagcctttatttttcaataatacatgtagaatagaaaactctgttggagtaagtgaaagagctttaccatttaaatggcattcatatgtttgggtattcaattccagacctaaaaaagaaaaaatatgtgaaagttcttcaccagattgtaaacttccactgtatttcttatatcttctaatctgtgccttcactctagcaacaagttccaaaggtcggaaaggtttagtaacataatcatctgcacctaaagttaagcctgtaatcttgtctgtttcttcatccttagctgttaacataatgattggataagtatatttttctcggattttttggcataaagaaaatccatttactcctggcaacataacatctaaaattgcaaggtcaaattcatttaaattaatgcagtttagtgcatcaagaccagaataaaatttataaacaatatagttttcatttgtaaggtagacttctattaaatcagctatatcacgttcgtcatctacaactaaaatttttccactcatagactttaaacatcctttctatatatatttatatatattatactaaatttaatttttttatatgattttttacattagaatttattaagaaattcttaatcttattatgtaactattttattatttaacatatattaaagataaaaatgaatatatatagatttagatatacaatttatctatcttttcaaatataatctataaaataatagttctgttacgcattttttcatataataaaactgactgtaatttaactggcaaagtctagaagaataggctttatcaattaaattacagtcagctattttataataatttagtttagatatcgttagcatttcacatttataacaattattaatgagattaatatatttattattctttattaaaataatatcctgctcctcttattgttataattttctgaggatttttataatctttctctattttctttcttaatccattcactgcaactaccacactatagttatcctctaagtactcattcatccatacatgttcatatatctctttagtagtcagagtcttttcaggattctctataaaaaagtttaacagcttattttctgttggagtcaattttattattttgtcttctaactttattactccactagttctattatattcctctaattttgtattattttcattattatttacatatgagttcattcttcttaaaatagcttttacttttgcatataatatttctaaatttagaggctttattaagtaatcatctccgccagaatttaaagcatttaaaatgctttgttcttcatttatataagtcatataaacaattggacaagtagttacatttctaatttttttacaaagagtccatccatcaccatcagttagaattatttctaaaaatattaaatcatatttattgctaaatatttttccaatagcttcttcacaattatatgctaaatctatacttatttctttttcctccagaaatccttttagcttctggcaattatccttgtctccatctattatcaatatcttagtttgcattataatcactcccaaatatcattattcttttatattaaataagctattattataaaaaacatagacttaattttattgtaaaaacagttccttttcctagttctgaatctacaaagatttctccgccatgctctcttataatggatttgacaatatataaccctagcccttgcccttttggctcattattatctctttctgtaaagaatctgtcaaatacctttggtatattttctggaggtataccttttccattatcagaaactttaataattgcaaatccatcttctttatccattgataaaattatctttccatcaaatggagtaaatgtcaaagcattataaattaaattctcaaatgctcttgtaagcatctctttatttatctttgcatatatttttttctccaatatgtaagtttcaaagtttacaccacatgcttgtgtatctggcaagttattttcatatatctctttaataaaatcatttagacatattttttcactaataccaatgcttttatcttgtgatgtaaattcttgcaaactacgtactctattttgtacttcatttgacttttgatttatagcataaagataggttcttgtctcttcatctacatgaatattaccaacctttatcaagtctataaatgattgtatagctgaaacaggtgcctttaaatcatgtgccacatctgccaagaattttttacgttcatttaacaatgttgtaagttcattagttctcacttcaacttcatgttcaagattccttgtaagtttttcattctcttttattattattctattcctgtttatcatcataagagaaaataaaataacaattataaatccacaatattctgtttgccaccctgtaaatataggctcaaatctattactagtaactgcatcaaataatatgctaattccaaaaacagtgtttactgaaactaaaatataagaacttatatgctcagagcatgtctttttatatattgaaaccagcgaagacattaatatatatataaatacaatatatttatatatgtctattaatttcccatatatgttgacaaagtacatatcatatggaagaagaataattggtatcactatagatatgatactcattgtaattcctaatggtaaaattaaaaatctatacactttatcttcttctattttggatatacttccatttatacaaataatacataaaactaccataaaataggacgaatcttcaaccgcatatgtaaagcttaccaaaggcagtcctaacaaatgtacaaagggataggatacatggatggcaaagaaaacacacatacatccaaaatataagtaaagtttacttttgtttgaaagaaaccatacagacaacgaaaatatagctattgcaaaagttgtgaagcaaattatactataaaaaagtaatcgataaaacatcatattacttatgtcctttgtttctcctaatgcaggcggataatacaaaccactataataatgtgaaaaattcgatacattgattataatttctgtatctttctttgcaataaaacttactactgaatttttaattttgggtctatatttttctgttcctacatctcctaatttagaaactatttctccatttatccatacttcacttgcggaaaaaatctcaggaagctctaaacttagtagcttatcctcaccttcattttttattctcatacgataagtagcattcccatatggtgactgattcccttttctcatagaaaaatctggatattgacctataaaaacatattctggttttatatcttgctctgtaaaatcattcggtttaaatattttatgattataaaactcccagtcatctatcagaaagacaagtttacctttagtgaaagtatcattatctatagttaaaattccattacttgctctaatagacttatatgtatatttattatcatatttatacagaagatttaatcctgctattgccaacagagagactatcaatacaatgagagttccttttagtatattatactttttcattgcatcaaccacatctctttcatagtagtattaaataaaacaagaactatttattaattacagtatctcacttatggtacaaacttatatccttttccccatacggtttgaatgtattgatgctccctgcttaaagaattaattttttttctcatctgtgcaatatgaacctgcactgtatgttgatctccaatatcaggcattttccaaacttggttatatatctctatcttcgaaaatacttgttctttgttttcagctagaaacaataatatttcaaattccatagtagttaaatctatactttctccatcaaaagttacttttcttgaatttacatttattactaacgctgaaaactttaacacattaggaactgatgtaatatttttgtactgcctcatacgagcatatattctaagttcaagttcttttaaactataaggttttgttatataatcatcccccccagctaaaaatccccgaactttttcttcttcatgctcataattagataaaaatattataggtatgttaaccttttcttttatatcattgcacattttatatccatctatatctggcaatgaaatatccaaaattatacagtctaaaactatacgctctactatatccatagcatctttagcagtctctgatgtatatacattaaaacctatattagaaaaataaatttgatttatatttaaaatatcaacatcatcatctacaaccagtaaattatacattacaccactccattcaaaggtattttaatcataatctcaagttttataattattacaaattataatgttttattttcatatataactagtattattattttataatatctttacaaactagactataatacttaagtatttttgaacaattcttgaatattgtattgaacattaagatttattattaaatactaattaaagtctccgattgttggagaatggagcttaaagtcattttcacttataaatttattatttttctagaaacttgtctattggctagtttgagtattgatttatatgatttatatggttataatataaaataaattgtattattttggtaaatatattgttacaaaaggtttatattttgcatctcaatgtttataaaaactttattttcttattataatagtattatactttttaaaaaatttcccttttccaacaaatggctactttaaaagccaaaatttcacctatcaataaaaatcttaacgactaatactcttattttcaaattttgcaacatttttgttaattttaaagcaaaaaaagactatgcaatataaaaattatattcatagccggttgcaccactaactccatatatctccagatgcccaataataagatatacttctcagtttctaaaatatttttattaaaaatcttttatatattttcataaatttcttttttattctaacattgtaatattattttgtcaatatttccatatttttagatataagatactaaaatacctattttatctaaagatatttatatttctacattcaataatagacaataccctgcaagttaaagcatcatttttatgagcttatctcacagggtattatatgtttactttatattataattcatgttattgattaactttaataaatcctttttctgaaacaagtgcttgtccttcatcacttaatatataatctattaaagctttccctttttctgacaaaccatcttctttattaactaatataaatggtcttgatattggatatttattagccattacatttgcatcagttgcttcaacatcatttatttttaaactatttactttctcatcaacatatccaaatgatatatatcctatagcattttcatttccttcaactgtagtttttatatttcctgaaccatcacttatttgtgcatctttagttagttcttctgaatcaaaccctacaatttcttggaatccatctctagttcctgaaccttcttctcttgatactattactattggtgcatcatttcctcctacttctttccagttagtaatctttcctgtatatatacctttaacttggtccattgtcaggttttttactgagtttgcagtattagttatcaatgctataccatctattgctattttagtttcctttaatccagcacttttttcttcatcttttaaatctcttgaactcattcctatttcagatgttccttctatggcattttttatacctccggaagaaccaatctgttgtacttctacactaacaccttgatttttttcttgaaacttttctccgatagtttccataagaggacctattgaagttgaacctgaaacagaaactttgcttgaatctcctgaatcacctgaacctcctgagttagaactacatcctactgctaaagctccaactaacattgtactagctaaaagaacgcctattttctttttaaacattttacttacccccgcttatattttaattttttgttgtcatttttctatattttaataatacagattctttgttaaatgaatattagagcagggttaagtaaatgtaaatattgttaaatacatgtaaaaacttaattttatatgatttattcttaattagattaactttttaaagttactttaggcagatataaacacaatacaactcatattatcagaagtcttcattgaagctatcaacctatcacatcctataattctttttctagtttattaactaattcagcaaatacatttaaggcttcctctatagattcttttttagtcatatctacaccagcagattttaattgttctagtgggtattctgaccctccactttttaagaagtttatatatctatctactgcagtacttccttctgaaagtatctgttgacttaaagcacttgcagcagaaaaccctgtggcatacttatatacatagaagtttgaataaaaatgaggtattctcgcccattctattcctatttgtttatctactattgcagattttccgtaatacttttcatttaatttgtagtatatattagtaaattcatcagcagtaagtggttctccactctctaccctttgatgtacaattttttcaaattcagcaaacatagtttgtctatgaactgtagttctaaattgttctaaataataatttaataagtatatagtttcatccttagacttagaattttctaataaataatttataagaagtaattcatttaatgtagatgcaacttctgcaacgaatatcttatagtccgaatataaaaatggttgacttgttcttgaataatgactgtgaacagagtgccctaattcatgaattaaagtgaatagagaattaaggtcatttttatagctcattaatatataaggatgtgaatcataacttccccaagaataagctcctccttttttaccttcattatcatatacatcaatccacccttcatcaaaagcactttttatgaccttcaagtatttttctcctaaaggtttaagtgcctctaatatgatatcctgtgctttatcatatggtatatccatgtcaaatttatctgtcaaaggaacatacaaatcatacatgtgtatttcattcaatcctaaaaatttctttttaagctcaacatatttatttagattaggaatacttttatctatagctgatataagattattgtaaacatctaaacttacatcatctgaaaataaagacgcttctattgctgaattatactttctagtttttgcgtaaaatatctctgattttattccaccataaagcgttgaggcaaatgtatttttatatttctcatatgttgaaaattcaccttcaaaagcgtcttttctaactctactattcttactttttataaataaagagtagtttgaatgagaaagcttaaccttattaccctcctcatcttctatctcaggaaattccatatctgcatatgctaacatatcgtatacattttctggaattgtcgataattctgatgtagctgcaagtatttcttcctctcgttcactcaaagtatgtggtttatctctcaatatatcctttatatattttgtataaaaggatagcttctcatcttttaagtattcacttaacttattctcttctatcgccagtatttctggaactatataagaagtagccacacctaaatcagtagataacatttctgtcttagtggctcttccttgattatcattaattctagtatcttcatgttgtttcatatgagtatatacatataaattttgaacaatcctagatgcattttcagagatatttaatactttatataagttctccttactctcagaaagcttccctttatattcttttacttcttggataagattttttactttacttatgtctttttcaatttcctctttactggagtacatcttatctatcttccatttgtacttttcttctattgtacttctatcagttcccatatcatacacctctattttaatttgttttatattttattcactttacaaaatatattgtatatattttagtccaaataatctacatttattactccttctatcatatttatttctttcataacgtcgtgtaagtgtattctcttagcataagatacaaaaaaattaaccttccagtattcttcattacgacattctatttccatatttcttacgataagttgatttttttcaaatttatcatataaaaaaggtatagagtccaaattgcttaattttaatatcaatacattcttttcttggctaaataaaaacgtattgattatcctaagcacaaataatgctatcattacaaataatccacctagaattgccaattcataataaccatatccaactgctataccaatacatgcagttgcccacatcccagcagctgtagtaagcccttttactccacctttattttttaaaattgctcctgcacctaaaaaaccaattccagataatacttgagcaggcattcttgctgggtcagcatttgtatacaaattataatcaaagaataattgaatcgaagttattgaaacaatacaagaacctattgcaattagtatatgtgtcctaaatcctgcaaactgtcttattttttctctctctaagcctattattcctcctattattagtgctaatagtaaccttattgctatctccttacttcctatatcaatcataatataaaaccctcctgacttaattacaacttatgtcctacagataatttacacatcagaaatactattttatatcttaatattattattaatatatgtaaaatatagccatctgttaatttttgatacaaaaaaacccacaactgtgggctatttgcttaggtacatgtatttatttattaatatatctattttcttacttgattctactaactcttcttgaaatatttctggatattctatgtatgtatttatctcttccctaactgcttcaatctcattttttaacgcttctaattcattgttcgccataataatcaccactattacaaatttgtatatttttatatacattttatcaaacaatattatattttgtcaatattatgtcaataaaacttactataaaaatgctttaatttaggtattgtatacctggatactaagcctacaaacataccagttactaatgatgccattaacataaatggtaagtaccctatagcaagtatattttctatgattaaacttgcaactattaattgacctatattatgccctattgcacctataatgcttatccctattagtgataaatcttttattttactcgctaaatacataaataaaagactcagataagctcctcctatactaaatagtagatatgataaagggcctgcaaatattgatgacaaaattaccctgatagtaacaattataacagtatctttgacacctaacaacattaatgaaattaaagttataatattgctcaaacccaattttgcccctggaaatataactataagaggatttggtatatatgtctctagtacatataaagctaaactataccctatcataagacctaaaaatgtcatttttctagttttcattaagttaactcctccaaattttatctatcatcttacattataatacaaaatatataaaaacacctaatttagactaaaatatttttaatctatttagaataaatattagttatttcaatgtgcaattacctctataaatcttgactttttgtatcatacttgttacaattttaatgataatgaatttcattaggaggtgttaataatgactgtttacgatttaaaaataggagaaaaaggatttattaatagtatagatggagatattaaattatctaaaagattgcttgcacttggatgtataaatagtactgaaatagaagttaaaaaggttgccccacttggagacccaattataattagatttagaggctttgaccttgcgattagaaaatctgatgctaaaaatatttctttacaataatagaggaggagctacccgtgattaatgtagcattattaggaaacccaaatgtcggtaaaactactgtttttaatctacttacaggttcaaatcaatatgtaggtaactggcctggtgttactatagaaaaaaaagaaggatttcttggaaaagagataaaggttgtcgatttacctggtatatatgcaatggatactttctcaaatgaagaaaaggtttctaaatcatatttagaaaatgaagatgttgatgtaatagtaaatgtagttgatgcttctaatttatcaagaaacctttacttaacaactcaacttatgcaatttaacaagcctatagttatattgcttaatatgttagacattgcagaatctaaaggagttaatatagatgccaaaaaattaagtgaagaacttggagtaattgttgttccaattatagcaaaaaagaaaaatggtgttgataggatagaagaagagattaagggagctacgcaaaaagcttttatatatcagaaaaactttggaagtgaaacagaaacatataaaaaattagaatccattttatcgagatgtacaaaaactacatatacacaaaagaaatctatcagtgataagatagacaatatagtcttgaatcctatattagcatatccgatatttattggtgtattgttcctcttatttaaatttacctttgactgggtcggaggaccactacaagagggatttgctagtcttatagaggcttatatttctgcacctgttagtgatatgttatctaactctagcccatggtttaaatcacttatagttgatggaataattggaggtgttggtggtactttaccattcttccctttaatatttacattattctttggtatatcgttgtttgaagatagtggatacatgtcaagaacagcatttttaatggataaagttatgagaaaggttggtctatctggtaaagcttttatacctatagttatgggtatgggatgttcttctccagctataatggcaactagaacattggaaagcgaaaaagatagaagagttacagctcttattgcaccacttatgacttgtggagcaaagctacctatatatgcactatttgtagctatattctttccacataatgctgctttagtaactacgtcactgtatttggtgggtatagttatggcaattgtagttgcattattcttaaataaaacagcctttaaaacagaggctgaaccatttatattagaattaccagaatatagaatccctactatagatgcacttattaaaaatacttggaataaatcaaaaggtttcttgataagagttgttactgtcatgtttgcaatgtcagtcgtaatttggggactttcttcattcaatgtttttggatatacagaagatataaatgtaagcttcttggctactctaggtcatattatatctcctatattcaaacctcttggttttgatgattggagaacttcagttgctattttaagtggtcttggagcaaaagaaatcgtagtaaactctttaaatatactatatggtaatctaactgttgtcttaccaacaatatttaatggagttactgcatatacattcttgatatttactgctttatatactccatgtatagctgcacttgcaactatgaaaaaagaatatggcaataaaatgatgtttacatcatttgcatatcaatttatactagcatggataatggcttttatagttaaaagcataggtggagtactatttatgggtaattcaataatggaagctttgataggtggaataattatagtccttgcactctttattctgtttaataaattcaagtctacaaaaaacggaaatgtctgtagtggatgttctatttgctctggatgtccaagtgctaattcttgctcaagtaaggaagacagcaataaaaaaagtaatacacactaatatataaatattttagtttaaaataagataaaagtgggtgtctcaaaattaactttttagttcatgaggcactcttttttatataaaatcaaatatattttcatcatttcaacagtcaaaaagaggcttatctctattttgagacaacctctttttttgttacttattcagtttcttgctacctaacttcatgtggaacctagtatcttttggaacacttgggtctacgcctcttaatgtaggtatttccccacatattagttgtataggtactataaaattaaatgtttgatagtaaggattatctgtgatatcaatctttaaatttttatcattttctgtaacatctctacctatagcaaatacattttccgtccaaccagaaagtacatcaatcatcttagttactctaggttcttttcctgtatctagtataaatatagtagaatcactatttatagcattatatataccgtgtataaactcttcaaactcatacccagttacaggtattctcattgtttccaataattttaatgctgcttctaatgtatctccatatatatcagagtgacctattattcttatttctttagaattaactaacttttctttgtttctttcaatccattgtttagagagcttatacactgcttcaaatctattaattgcatctaatatcttatttatttcctcattgtacttttcactagatattgtacctttttctctagctatttgaagacctaataacattaagtttaactttgtacaataatatccttttgttttagctccagatttttcttcaccacaatttactgttaatatataatcagaaatctcatctattaaagcattcttacaacctgccatagatgctattttacaacccttatcttcagctaacttcatagcgttgtatgtagaataactactcccaccttgagatacacctactactagggtattttcattatcaaacttgaatgtatcttcagttatcataaatggatacattttcacaacatctatatctaataaattttgtaaatatggttgcacttgcactcctgagtgatagctagtacctgaacctgttattataatcttttttagatttgctctcttaacttcattaaataagctatctgcattagatataatttctctcattctaactggtgtttctaacatataatcttgtattgtcattttatacaccttccttatctatatattcaataaattataattaatttctataacaaacctatagcatgtaaagcgattcctgttactatagtgcctatagttaattttgttacacttacctttctcttcaacatgtaatatattaaaaatgcaaaggttaaaggtaacatattaggtattattttatctagtatatcttgtaaaattacttctgcaccatttaagttaaatttcaaaggagtagttatactcaacatagttgcaaccattcctcctacaacgaataaaccgacagttgtagccatagacattatcttctccataagtccctctctttgtattctttcaagagaatttacccctactttataaccatacttaagtccaaatattctaagggcaaatgctggtatattgtataataataagaataatagtggtccaaagatattgccttcttttgcaagtgatactcctactcctgctgctataatcctaaatgttccccagaataatgaatcaccaattcctgcaagaggtcccataagagctgttttaacagcactaattgaactttcatcaaattctggattattagcattttcttcttccatagctgctgttatacctaatatagcaggaactaccactgtcgttgtattaaaaatctctaaatgcctttctattgcttttgcttgattttctttcttattatatagcttctttattgcaggtaacattgaataacaataacctaagttttgcattctttcgtaattaaatgcaccttgaagagcaaatgaacgccaaaacatacttcttaattctttttttgttaatttattcaaagtcaatctctccttccgttaaagtattcattgctaattgaggattttgattattttctttgttattgatataaaagtttagtacaaatgctacacatactccaaataaagctatagcagttatatctaatccaccataagatgctaacaaaaaccctataaagaaaaatacagacatcttttttgaaatcaacatatccataagcaacgcaaaacctactgctggcaacaatgttcctgcaacacccaatccgtctaatataactttaggtattgcatttatcaatgttgtaactttatcagcaccaatcataattgctaaaaaggttggaactgatgtacttaaaaagaataatattactggcaaccacatcattatggtaactttcttaaaatcagcctgtttagcatagaaaactgccttttgagaaaagtacgaatttattattctaactaatactccaagagattgtgctaatactgctactggcactgccactgctaaagcaacttctgcaccattacctgataatatagcaaaagctgtacccaatacacctcctgttactacgtctggaggagtagctgcacctatccctgcaattcccatccaaattaattcaagctgtgcaccaatcataattcctgattttatgtctcctaaaactaatccaactaacatacctgtaactattggcctatcaaacatagattgaccaaatatacgcccatctagtataccaactcctgctataatagctaacatagtagcttgtactaacatattgaacctccattttaacttagtttaatttacattaaattacattacatttttgattttatttcgattttctaataactcatttacataaacaattccattttttgcttcctctaagcctgatttaactattagttttgtatcctcctcaactaataagaatatagataaaagcattggtaaatttacgcctgtcaacaattcaaatttgaacccttgcaaaagtaagtttgtacatatatttgccacacttccaccaaacacatctgttaaaacaacaaattcttcactatctttattatttgataatatacttctaatttctttctcagcatcatctgctgatttatcttttgtcatacaaaaatactcaatattagctaatgaaccaattattaatttacttgtgtcaacaagttctctagacaattctccatgtgttgcaattagaaattttttcattctctttctcctaaattattttattaaatctgatagttgtttctttttgtctctaggtaacattctaagttctatatcaattcctaaatcacctatttctttaaagttatttatatcatcatcatcaacagcaactaaatctgtaagtttcttttttccttcttcatatcttaaccctcctacatttatttcttttaatactcctcctgaatttttagctacaactaaagcatctctggtattttttactaacactaatacattgcttttctttgaagaagcaaatttttctactatttctccagattcctctaccccccttatatataaagttacattgctaggtttcgctaaattcagtgacatagctttcatttggtcattttttgcttcatcatttgcaactagtattacatttatacctagtgatgttgcccatccatatgcaacctgaccatgtatcaatctgtcatcaattctcatcaaagataccattttccccaaatcctccatcatacattaaaatttttattgtttatactctcatttatctataaaagcaaaaagtatgccaaatactggcatactattttaaatttcatttacttattttgtaatcttgtattttactgtggtagaccatagataatattataaatatatcctatctctgaaattggtatttgcacactataactcttttctagcacactaaatgcattttttattagttttacttcactatgatggtttttgattaacaaatccatatcagtatactcttcaatttcagtttgtctaactaatctttcaatcatacaacttaaatgaacatataaagaaatctttttatcatttggaagttttttcttttgaatattttctatagcattgattccttcttctattctctctattatcttttttgaatctaaaatagttagactgtctattactctaattaatgaaaaattctttacaatagaatcatttatgttctttattttttcattttctactactctactaaatattctaaaaacatcatcttctccttttcctgatattatatcctctaacaatataaaatccaccccattcacatttggattagcagttcctactatagccatcacatcatacatttcaaaaactggttctttatctcccatagaaacaagactatcataatcataaggtattattttgacatcaactatcccaattaaactttcggaaagtagatgttggatttttatagcagtacctatccctgtaaaacaagatgatattatagcatattctttatttttttgaggataatacaattgtatattaggtttagtttcttcatccataatttctgcaatctgttcaatgtttttaccttgcattaataaatttcctacttctagtgcagaaatagtggatatttggtctataaataacattggcccatttatcttattttttaaatcttcatagataagattaagagagcccatatcaaataacacaattaaaccattctttatcctatctccttctaggtatctagacatttgttttgatacatcagcaatggtagcatctataggcatatcaatagctgtaaatatatttttacccaacatccgattacatacattcgccatactactggcagtagcatatccatgtgctataatagtcgcattaacttgattaaatttcattcttataattgttgatttaataaatataatcattatgattgtatctacattattaagatacatatccaatctattcgttattaatgttgatattttacttattatagagtattctttgtaactctctttttttaaatatattagtaatttactttctaaagctttatactcatcagataattgataagattcgtccttcaaataaagataagacgaaaatgccaatacattattcccatcgtattttatattgttattaacttctaaatttctaaatatatcctgcattatcgatattataagctccataagtacgttattattttcatcattatttgaaaagactaaattgtccattagtctaatcattagattagaactctttttactaaatatttcttttgttatttcatttttttctagtctatcaaagtagtctaaacattttatgaaactttgatagattatatttcttttatttcttccatttgacatttcaatactaaattgtttaggagaaaagataatgcttttgcttttaccactttggaattgaaatatatctacattttctatataaagatttctagggaggtcttgaagagtaacaaaaatatttccatttcttctttgattttttgcataagctcgtccacatgcatattttattacatttttacattcacctatattccccttgaattttatctttaaaatcgtatttaatgtaatttgagttatctctataggcaagccaagtaccttactttcttcataaataaaatgttctacaatctttcttttttcaatagtccctctttcttctatattgggaacataaatatttatgggtattcttcttaaaaaagtttgcaaaaatttggatagactttctgttgttgcaaatattaatcttaccctagcttttctaattactccattctctccaatcctagaaaacgtacctgtatccataaatgtaaataacttttcctgaccttcactatttaatctatgtacttcatctaaaaataaaacaccaccatctgattgttctattagacctgctctagattcatttgctccagtatatgctccttttacatgcccaaataatagactagacaataactccaaattattataatactgcgcacagtttaacacattgtatggagaatttttttctaatacattactgcttacactatatttgtatattatcttggctaaaaaagtttttcctactccactttcacctgtcagcattattgtaagtccgccatttggataaagtacagcggtttttatttgttcgattacttcttttaagctattatcatatcctatgatactattaaacacagtctcttgctttaataatttacactcatttttaagttcatctaaattttcataaatacttttttttgtaggtcctactacatcatttattttatttttaggtaaaaaaataacaggtctactgtttatctttataagattatcagattttactaaatcatttaataatctacttgattgagttctacttaaattaaacttttttactatatcttctgttattatgccactttcttttttaagttcatcaaagttgttaaataatacacattcatttacaaaacttaaaatttcatccctcatgttcaacctccaatacaaatatcaataatactataatattagtatatcatttatatatttatgaaaaagataattatattcctatcttgattctcttttgtaaggttgtaaaatcaaactttttataagtataaaatctagattttttaacataatctcaaggttcttatctttccatatatctgacatagaatttatataagaatatatttattgtatttattataataaaaagtaaaacattataggtattttaaaacttattagcgaagaaaatatttgtaacttttattaccttatgaatattatttcaaatttaaaaaggctataaataaatttatttttaaataaatctacttataacctcacaataatacttataaattttattttttcacaatgatatatctcaaatatagttaaaaatatatctatttaattattaatatttaagtaataaattctcactcaatcattaaattcctttttatagtaaattactcttattttacttataccaaatacatttatgtatagatataaataagtactaaaaaaacaattcaagaaaccatatagtaaacttaattacatctgttatttgctcatatctttagacttatctatacaagcaacaatagattttataactgctgctctaaagccttcttcttctaataccttaacagcttctatagtagttcctgctggagaacaaaccatatcttttaattcacctggatgttttccagtttcaagaaccatcttagctgaccccattactgcttgagatgcaaatttataagcttgttgtcttggcattccagctaatactgctgcatctgccatagcttctataaacataaatacatatgcaggagaagaaccactaatacctgtaactgtatccattaaatattctgatactatttctgcctcaccaaaagattcaaacagagccttaatcatatttaactcttcatctgttacattactatttttacaaagagctgacattccctcgccaacaagggctggagtattaggcattactcttactatttttttatctgaacctataaaactttccagactttctatagttttacctgctgctatagatactattattttatttgcatctattaattctttaagtggagttaaagccttttcgcatatattaggtttaagtgctactattaccacatcagaatttgtaacagctacctttgaatcagttgtagtatttattccaaattcttcttttactttatctaaggcaacttggcttaaatctgatacagttatatcttctgcctttactaatcctgactgtactatgccacctatcattgcacttcccatattccctgaaccaataaatcctaaagttttcatatcaaatctccttttttctattagttttattttaaagtagctaaattgactttattttaactgcttaaaattatcttatttttataaaatataaccttattataactataataaattattcttttgtatgtattacttactaatatgtgtatgatttactaaatataaatttaacgattttttcattaaacttaacgagctaacttcctatttagaaagttagctcataattaatctaaaattttaaaaatggaatcaaaccatttatactttattatatcagttacgattttatatagtaagaagttttatttacaagcaaacctagaatgtttgctcagttcttcctattatctcatcttgtagtgttctacttaaattattgaaatggtcactatatcctgcaactctaactattaagtctttataatccttaggattcttttgagcctctaacagtacatttttatcaaatacattaaattgtatatgatgaccatccatattaaagtatgctcttactagattagccatattatctaaccctttttctccttgaactactgatggtgcaaatctttgatttaataatgttccaccagtttttatgtggtccatcttagcacaagattttataactgctgtaggtccattagtatctccacctttttcaggtgaaattccctctgaaactggttttgcacaaagtctaccatttggacttgctcccataatttctccaaagtatatatgacaagttgttggtaacatatctactctgtattctccaccacaaacagttagtctaccagttacctcattgtaatatgcattgaatatctcttgcattatttcatcagcataatcatcatcatttccatatttaggagtcttatttgaaactaaattaagtatagcttcatatccttcaaaattagcatcaagtgctttaagcaatgtatccatatcgaattttttcttatcaaatacattatattttattgctgttaaactatctgttatagttcctataccaacaccttgtatatatctagtgttgtatcttgctccacctctttggtaatccttgcctttttctatacaatcatcaactattgtagacataagtggacaaggcatgtgttttgcacatatattttctatcacagcatttccttctatttttatgtcaatcatataatgtaattgctttttaaatgcttcaaatagttcctcataagattggaaatttctagggtctccagtttcaatacctatttgttttttactaattgggtcatatccattatttaatgttaattcaagtatttttggaatgttcatatatccagttagaacatatgcttctttaccaaaacatccagtttcaacacaaccactggttccaccaagtcttgcatcttctatagtttttccagcttccataagctcttgaactattgcttcagtattataaaatgctggttgaccccatccttttcttgatatttcacaagctctctttaagaatttttgaggagtctttttacttatttgaacatttgaactaggttgtatcaatttcatttcatccataacatcaagtattatataactaacttcattaacaccatcttgaccatctggatttattccaccagtgtttatatttgcaaaatctgtatatgtgctactttcttttaatgttataccaacttttggtggtgctggctgattgttaaatttaacccataaacattcaagtaattcttgtgctctatctctatctagtattccattttctacatctctttcatagaaaggatttagatgttggtcaagtcttcctggagtaaaagcatcccatatattaagttcagtagtaacccctatatgaacaaaccaatacatttgtatagcttgatgataagtttctggtttgtgagctggtacaacatcacaagtttcagcaattagtaataaatcttttttcttagcttcatctgtttcttcttctgccatttgtcttgctttctcagcatatcttttacctaatataaccattgcatcacaagctattgccatagcttctaaatctgcttttttattatatgcatctaaatcattaagaaaatctagctcttttaatcttgcttctatgtctttctttaaatctaaaaatccttttttatatattgtatctccacaaactgtatgtcctggggctctttgttccataaactctgtaaacatacctgcttcatatgctgctaaccactcaggtgtcattgcatttattatcttatctcttgtttgtctttttttccaaaaaggaattatttcttctttatgtatttttctagcttcttctgatacgctaaaatttattatatctctattgtgcattacttctaaatcttccattgtgtgacaacaaatttctggatatgttggtgctccattaggagaatcacctttttcacctactattaattctccatcatttatgctaagagttctattctcaatataatgcttaaatgataaagcacgaagtacaggaatctctacacttccctcatattttttataagcttctgtcataagtactgctctttcaatagatatgtgtggttctgcattaatactttcttctcttaattttttagttctctcaaaagttcctcttgccattttattaccctccaatcttagtattgaaattacttgcttcaaacagtctttttatttcctctaatttttcttctgatggtctttgtagttcttctccttcatactttttataaattttatcatacttgtgtttaccaatattatgatatggaagaagacttactgcttgtatattcaaaggctttaaaaactctatcatttttttaacctctaaattttcatcatctacatttactcctacaattaatggtattcttatatttatgttaacccctaattcacttaaaatcttaacatttttcagtattaagtcatttgattttcctgtaaattttatgtgcttatcctcatcaataagcttaatatcatataaaaacaaatctgcacatttagcaactctttcataattttctgactttgcatagccacatgtatcaattgctacatggattccctttgatttgcacatgtttattactccacaaatgaagtccatatcttgagccattacttctccacctgatagtgttactccaccacccgattcttcatagaaaattctatccttctctatctctttaaccaagtctcttacagaatactcttgaccaacaatctctcttgcattgtttacacaatagtctaagcaagtttcacaaaactcacacttatcttggtctaagcatatttttgtttcacctttgtaaattgccttatgagggcatatatttatacatgcttcacattttgaacatctttcttcattatacaaaacttgttttgtatatgtttgactctctggattatgacaccaaacacattcaagtggacaccctttaaaaaatactgtacttcttatccctggtccatcatgtatgctacatttttgtaagtttataactaatggattcatgatttttcacccctaaataatatccattccattttttcatttttatgcaattcatcttcatagaatatacctatgaaaagcatttctacaattacataatactatatttgttattattttgtctatatatttttagtaatattaaaaaattttattttattatgatatttatattgtttttgtaaattaaatttaaatatttattaaatttatttttataagaaaatatagcaataaactataaacaatacatcattttaattaatttagatgtatatactataaaaattaaataaaaatagagactacactttaccatgtagtctccttctttctggtcatatttagaaattcacatttattgttactgcttttccgcctctatttactgttatttttgtactagcaccttttgagaaagtatacaactttttatttaaatcattcatacctgttatatctgtatctcctactttagttataatatcccctacctttactccagctttttctgctgatgaaccagatattacttctgcaacataaacacctttatcagtacttaattttgtacctgttgctgcttcataatttgatacatctgtaccttttatgcctaaagttactttttcatattttccatttttgattacttcttcaactatactcttagctgtattgattggtattgcaaatcctaatccttctgcttgagaagcttttgctgtgtttataccaattacttgacctttttgatttaacaatggtcctccactatttcctgcatttatacttgcatcagtttgtaataaaccagtcatattagttttttctgtttgtatagttctatctaatccacttattatcccttgagtaactgttttttgaaaatctaatccaagaggattacctattgctattgatatatctccaacttttactttgtcactatcagcaaattctgctggtgttagtccagttttatcaaccttaactatagctaaatcaagttgttggtcaaaccatactactttacctgaagttgttgaaccatcattgaataatacatttacacttgtagcttgaccatctgatataacatgagaattagtaagtatatatccatttgaatcaactatgattccagttcctacaccttgtgtttcagttggtattgcaaacatattactagtatcaacactagttgttgtaatacctacaacagatggcgtagctttttctgcaactgcttgataaatattttgactcttaccatcatcatttacaactatcggcgtagaacttcctgtagatttgcttactaaattgtccttaactaaaattattgttagaaaactactaagtattgaacttattatagcaactaatattactaaacttatccctttctttcttcttgacatctcataccactccctatcttaatataatataaattatcaaaatatatttttcccaatttttcataaaaaaaatgaaatcatctattttgagtaaactccttttcgatgatttcattatattattttaatcttaattaaaccttaactatttaaaattatttaagtcttttttctagctcttccttttctttttcataacctggtttgcctagtaaagcaaacatatttttcttgtaagcttctactcctggttggtcaaatggattaactcccaataaatatccacttattccacaagccttctcaaagaaataaactaaatatccaaaattatactcatctagttgaggtatatttattactaaattaggtacttttccatctgtatgagccaatagagttccttcaaaagctttatgatttacaaaatctacagtcttacctgctaaataatttaaaccatctaagtctacttcctctgaacttatagttatatttctcttacagttttcaacattaagtactgtctcaaataaaagcctttttccatcttgtatgtattgacccatagaatgtaaatctgttgagaaatctacagaagcagggaataaacctttattttcttttccttcactttctccataaagctgtttccaccactcacttacataatgtagttgaggttcatagttcactaataactctacatcttttccttttctatgtaaaattgttctagcaacagcatatctataactatcattactttttaagtcaggattttgaaatgcttctctagcatcatttgcgcctttcatcatagcatcaatatcaagtccagcagcagcaataggaagtaacccaactgctgtcaatacagaaaaacgaccacctacatcatctggtattacaaaagtctcatatccttcttctgtagctaactgtctaagtgcacctttacttgcatctgttgttgcataaattctctttcttgcttcttccttaccatactttttctctaagtaatctttaaatattctaaaagccagagctggttctgtagtagttcctgatttagatattacatttacagaaatatcctttccttcaattatatctaataaatccataatatatgttgagcttatattatgccctacaaaatatacttctggagcctttctttgctcttttttaagtccattcctaaaagaatgacttaccatatctatagcagctctcgaacctaaataagagcctcctatacctattaccagaagaacatctgagtctgattttatcttctcagcagatttttttattctgtcaaactcttctttatcataatttttaggaaggtctatccatcctaaaaaagtatttcctaaaccagttttattatgtaacatgtcgtgcgcaacatctacatatggttgcatgacatctatttcgttttgacaaaaaaactctgtagctttactataatcaaaatttatttttcccatttaaatccctcttttcagcatattcgttttaaagagattataacacaaaatataggtgttttttttaaaagtttgccacaaaatcatacatatctcatcatttattatcaggaaatcgattcttctaaatactataactatgtataaatttaaaaattttagtcaaataaatttacaaaaaaagaaactctaaacgtatcatttaaagtttctcttttatttatcctctattttaaattttatattattttaaattaattatttttaatcatttcctaatctcttcgctataacttgttgtgctatattgacagcatggtcagatattctctctaaattacttattacgtctaaataaataactccattttctatactacatagattattgttcaatctatacatgtgattagctctacaagatttctccattatatcaacttgttcttcaatttttataaccttacaagctaaatcaacattatcagttctcattgattctaatgcataagtatatgctgaaacaactctattatacataacatcaagttcagattgtccttcttctgagaaagaaatatttgaatctattgcaacttgcgataattcagctatatttttagcgtggtcaccaattctttctatatcattgactgtattaaacaaagtatccacaacttctcttgaatcatcatctaaaggtgcttttgaaagtttaagtaagtaatttaaaatagctttctgtaaatcattgattaatctctctcgtctatatgtcttagctattttttcagttgaatgttctactaaggcttccatagatgcatttaggctttccttcgccttctcacccatacgaagtgcttcttttatcgtatttgcaagagctatagaaggagtttctatcattctatcatctatatatttaatagttttagtttcatcttcatctatatcacctgctctatcaggaacaagctttatagctagttttataataagatttgtaaatggtaaaagtatcaatacagatattatattaaacaatgtatgtgtattggctatttgtcttgcaacattgcttggatcccaacttgtaaccatgcttactactggtttattcaagaatattaagaatatcaccgttcctaaaacattgaagattagatgcatcatagctgctcttcgtgcatttttgttagcaccaatacttgataacagtgaagttacacatgtaccaatattttggccataaagaattggcagtgctgctgataatggcactagaccttctgctgccagtgcaaccaacatacccatagatgcacttgaactttgtattattgctgtaatcccaaatcccaataataatccaagtagtggatatctaccaaatgtaacaagtaggtcagtaaatccttgatagtctcttagtggctccactgccatcttcataaaatccatacctgtaaataatataccaaaacctataagtatttcggctatattttttattctaggcttatttccaaataaataaagtataatacctacacctaatgctactggggccataccagttaagtcgaaagataccaattgggctgtaacagtagtccctatattagcacccattataactcctattgcctgttttaaagtcattattcctgcatttacgaaaccaacaaccattacagtagtagcacttgaactttgtattactgctgtaactcctgtacctaccaaaactcccataaataggttactagtaagtagttttattatcttttttagctttgtcccagcagatttttgaagaccttctcccataaggttcataccatataagaacagacctaatccacccattagacttattataatgttcaaattatttcctccttgtaaagagattactgtatctaaaaattttataacctattgtattttatcaaattataggagtgataatgttaaattcatgttaaatattaaaaaatcattaagtttatgttaaatttttgtattattggtgtatttttgtattattttttctgcacattttataccatcaactgctgctgtaactataccacctgcatatccagcgccttcaccacatggatatagattcttaatactcactgattctaaagtattttcatctcttactattcttattggtgatgatgacctagtttctactcccgtcaaaacagcatcatacattgcaaacccattcaattttttatcaagagatataaacgcttctctcatagtctctgttacgaagctaggcaaacattcacttaaatttgtaagtgtatatcctggtctatatgatggctcaacacttcctaaattcaaagaagtcttattgtttataaaatctccaacaagctgaactggtgcattgtaattttttccacctaattcaaaagctaatttttcatacttctgctggaaatgaacacctgctagtggattatcactcttaaaatcttctggcgttacatttactaaaaatgcactatttgcatttattttatctcttgcatgttcactcataccatttgtaactatttcaaaatcatttgatgcagatgctatgacactacctcctggacacatacaaaaagtatatgctgttcttccatttgaaacatgctctataagtctataatctgcagctcctaacctaggatgattataaaaatccttgtactgtgctttatttattaaatcttgtggatgttcaactctagctcctattgcaaaaggtttttgaactatttttatacctcttgaatacaacatttcataagtatctcttgcactatgtccaacagctagtataattgtatctgtatctattttttcagtatcatttattattacagattgtatagaatcatttgatacaactatatctgttacttttgaattaaatctaacttgaccacctaaacttattatttcatttcttatatttttaactacattttttaatatatctgttccaacatgtggcttatgtgagtataatatttcatctggtgctccaaactgaactaactcttctaatacttttctacatcgtatatcttttattctagttgtaagtttaccatccgaaaaagttcctgctccaccttctccaaattgaacgtttgaattattttttaattttctagttgtccaaaaatcacttatatctttggttctactgtctacatcaagacctctttcaagtatgattggttcataacccatttgagctaaaagcagacctgcaaataaaccagctggtccactaccaattaccaaaggattattctttaattttttatcacccacaggtacatttatgtatctgatttcctttatttttgttacatcttttatttttgagttaagtattttattttcatctttgacttctacatctacagaataaacaaattccatttttcctttttttctagcatctatagattctttatatatactatatttgactaagtttttttcttttatttttagcttcttaagtacaacatcttttaataaagatatatctttatcaattccaagttttacattagatactcttaacatattgttttcctctcttagattgtaatataaaaaagctagggttattcctagctttctacaaatataacttctatattctcttttactagattttctacccaaatctcatctagcacaaaattctttattttgtttacaacaagtgttttatctaaatcctttttcaagttttttactaagaccattgcttcaactgatttatgcaatctttcaacatacagagaattaactttaatcaatacaacccttaattcacacacatataacttttcactacctaaggtgatttcatcatcatattcatatacactaaattcatatgtattttcataaggtgttatattttctattcctatatagtccatttatttatccttttttagttataagacctcttataaccttcatgttattaaacaccttttctaagaagttctctgcttcttcattgtctaaaaggtttatttcaaggttttcgttttctacaatacctttagatttacagtactctttagcaacatttattagttcattttttttatccatagataaatcaaactctttatagtctattattatatattgtttggtatcaggtgatacaccattattatatcctatttctatatgataaataactgcatatatttcttctccgttgtacacaggtacagctgggttagattttataaagttcgttgatacagcaattgcatttcctaaactaagactcattattaatacctctttctaaacattatacatatattatactatagattctttatctatgacttaaagctttttataattaattaagatatttttaaatctttgtatctctttcctagtgtactagagcttatatcgtatttctttgatatttgaacttgagttataggttgtcctgcttcttttttaacatagtattcaacagcagctgcccaaccattttcagctccttttatattttcatgatttttcttatattcattccaaaactctatacatgcatctatattttctttttctacattttctttaagagtatctaaaactttacattcttcttcagctaattcattttctgaattaacttttgtatcgtttttatctctttctctctttaaatattcagctatacttgggtctaaaagctgttgtatatacttgtatagtatatgtgtatgataaattaagaacgacttcatatctttgtatacatcttgatattgattgaatagattcataatatcctttaaaattatatctttaacctcatttgatatacttatagttatatctatcaatatgttagttccttcaatatcaactattctagctatcatacaacttccgattttaaaacttctcagaagttttacatcttctgtacaaagttcatttccacttaaacagtcctttaatactatttttccagcagaaacttcttttacctcataaatacttacgtatgattcaaacatactttttaatattgatacttctgattgacttaggtttgcaccattttcttcaagaaaaccaactgtcataacctttttattttccattatgtggtcttgtattaaataagtattaaaaaatctttcaaatttttcatttacactatcattttgcattatataaaacatttctttagctttttcacattcttctttaaacttatcctgtcttgaataatcatataactttgaatataaatctgtatattgtttttgtgaaagttcagtttttctgcatgctctttctgaaacaatatctttatttaaacaacatttcttgtattttttgccacttccacaagggcatagctcatttctccctaacaatatgacttccactcccttattattaaattaaagtacaatttgttattataccatttttttattaatcaatctatagtataagtaaatattctattaaattcacttatattttggtacaatatattaactttaattaggatttcgataaaatcatcaacaatccctcttgtagaaatgaattatcgtaaaactaattcctctataaaattttattaattgataatagttttttactttatctattcttttttgttatatgactctaactgtcattttacattcaacaatattgtctttttcttgtttatattcatttggaatattttgaacatcaaaattattgacttttaatttgttaatttctatcttttcaagtttattatttagtcttaacttcttcattacaccttcaagtttcaacacatttgcaagttctccattaacttttatttctaaattaacttgttttttattgtgattatctaaactactttcttgattaatatattctacattcacaatatctctcagttcattttctactaataacactatatctttatttgtttttttatctaaaaatgagttattaaaattatttttcaattcttcatttttatttaattcaacactttctatatatttatcatctatatgcttattatcctttatttgataattatcttgattatttattttatttattatattttgcttttcattcttcaaactagttaggttttcttccaaataacttactgctatatcacttgccaatataataactaatattaacaatattttaagtagatttttttctctattatttaatctcaaaaataatcacctatctaactttttattctaaatctataatattctccatctcttacaatactgtctatgtaataatattttatgtactttattttccttaggttgtttaaaacatctaaatcactacacacaccttccatctctagcttatttttatctatcgatattttagtaatactatttattccaattgtttcatatattttttttatttcattaagttttattttagaaaatttctctctagttttatctgttgttggtaaagtgtgctttgatttatccactagcttattttgatttatataatcttcaagttcatttatagatttcacatacataaatgatttaaataaaatacacgttaaaattaagactattattattttatagattttattacatggtttagtttttttaaatccattaagaaaatttattgttttatccactttcacttaaataatcattcctatactatttatataatttatcctattgtcttctaaatctgcatcaaaattattttctacttttactttatcttttaatcttaatggatttacttcaatagatttatctgtatatttaaagtattcttcaataaaacaattttctataccatagtaataaacatacttaaaatcccttaataatctttttatgaactcatatgattttccctcttttgatagcaagtatgtttctcttatttttttatcttttgttatatttataattaactgactttttttacattctataaataccccttcttctgaaaaattctctattaaatttaagtttataagcttttgtaatatatcaaaatttatatttatagtctttggattcatatttagattttctgaaatgttcttaattaattgaataatactctttgggaaaagaattacttgtatattcaatttatcatttttagaatttataactttatattttattgaatagttatttatgtttattggaatgtattgtgttatttcaaattcaatcatgcttaatatgtctctttttttcttagtatttagaacttcaacatttctaatgactatatcttgaatttgaatgttaaagtataaatttttatataatatttttgatttaccaatctcctcttttacaaatctaactacatcttctatatatttaatcttctcaatcgaattactatcattttttatatcaaagttaatctcttttataattgatttatctataaaaacttttttatgactttttcttaaaaatacaagccttatataatcatcatttatttctaagtttagaatttttttaattatagccatctccttcttaaataaaaataattttaaaacttacagcaatcaatataaaatattattttggataaaattgtttagaatttatatttacgcttatatctgttccgctatcatttatgacaagttcgaatttacctgatgtactctgaggaactggaacagtatttaggtatcccttttccttcaatgtttctacacttagagagtctattgtcttttcatcatcattaattgccatgctagctgcagttactatattagcagcattcgtatagtctgcatttaatttggcactttcttgaaccttactatacttaactaatgctatactagatataacgcctaaaatagttactactacaatcatttcaacaagtgtaaatccttttcgttttttatttatcaaatttatcaattaaatattctctccttttcaaaagtttcatctaataaaatttatttttctctctaaaaattagtaattgcatcaaacataggaacaaccattgctaaaataaaagtgccaataattaatcccataaatacaattagcataggttctataaatttcattatttgctctattttgttatttaattcattttcataaaatttatttattacatttagacttttatctagtttcccactttcttctcctgtatttgccattgaaataaataattttggaaaaacatttgctaaattcaaagatttacctatgctatttcctttttttatataattattagaaatctttaacctttcataaataaattcgttgtctataacactagctgacatgtctatagcttccacaatttgtattccactgctaattaaaacggacaatgcccttgaaaatcttgttgtagctactaactgattaattttttttataaaaggtattttgaattttaacgaattaatcaatttttttatattatcatttgttataaagaaataaatgcttcctattgaaaacaatataaaactaaatattatataagctaagttatttgtaaccactgtagatattcccattaaaactctagttattaaaggtggttcaattccattgttggtaaaaaccacctgaaaattaggtattacaaatacgaatataaacaacattgataagatagataatattataagtattattggatatattgaaatagttattattttcatttttaatttgtattctttatcataataattagataaatcactcattattatatctaagtttccactagtttctcctgcttttatcatacttataaagaatttagaaaatatacctgttatttgaaatgattctgctattgagttacctttttgaatatgatttgatactatactaagcaaattctttacttttttacttgactgactctcaatgatttcaaatatttttgtaatttcacatccagattccagcaatatgcctatctctttgcaaattactctaatttctttatcactgattctatttaatactaaataaaacttttctaaattataaaatatatttttagataatctcatgtactataataccttccaaattatattaattacaattaaataaacttaatattttctaatttaatgcatttaattttatttcacttaaatataatttatactcaaacatcttaattaaaatagattaaataaagacaactgaccaaacgaagtttaactatacaattcagttaaatcatttcatttactactaaacactcttctaatgtcgttattttttcatttattagtcttttacagctatcttcaaatgttatcattccattattttgtgccacatctttaatagtactagaatcctccatatttcttatacatgtctttatatcatcattaatttctaagatttcataaattgctgttcttccaaagtatcctttatcattacatttttcacaccctacagctaccttagtatttacatctccactaaaattatcttttatcataatctcatggctacaatgattacaaacttttctaaccaacttttgagatataacacctataagagaggcatttaaaagatatggtggtatttgcatttctagtaatctagctatggaagatactgcatcattagtatgtaaagtacttataactaaatgacctgttatagctgctcttactgctatcttagctgtttctgcatctcttatttctccgaccattattatatctgggtcttgtcttaatatcgctctaagacctacatcaaagctcaaccctacttttgaatttacttgaatctgacttatgccatccatcttatactctacaggattttctatagtcataatatttttatttattccttttaaatcatttaataaggaatatactgttgtagtctttccactacctgtaggacctgtcactaataatactcctgctcttttatttattatacgatttatagattttatagcttcctctgaaaaaccaagttctaatttgtcttttaaaaaagtatctctattaagtatcctcaaaactattttttcaccatagacagttggtattgatgaaactctaatgtcaattaaatttccacctaactttatatccaccctaccatcctgaggaagccttttttctgttatatccattgatgcctttaattttataaccgtagacaatgatggatagacatcaactaaaaactttgatacttcctttagttctccatctaccctcattctcactattaaatgttctttaaatggttctatatgtatatcacttgcattttcttttatagctttttctaaaagattttcaaataatttttttgcataatcctcatcaagttcaaagctattataatatttttcaatcttttcacttataagttcttttttctccttcttcaatataatttctttacctgtagctaatctcaagtcctgtagagcataaatatcctcatcttctatttctacaactaaattatcatcttgaaactcaactggaaatacattatatttctttgcaagtttttctggtattaacattggcaaactgctttcctctaatataatattaatcaccctttatatactttaatttattaggtatattcatttttttcatagagatattttcttcagtttttatgcttattttcattggataattggtttgtatgctatctaaatatttactacctttatctacataattagataatttctccttatctccaatgcactttatttcatatggttgtgctacaggaactccatttatatttatatggcttcctgcaagtacaacttctgaatattgattaattctttgaccatttatttctatgtattttcctccgtttacttttaattcatttataacttttacaagaatcttattatagtctatactattagctatattccctgttttttcatctatagcatctatacttaatattatcccactaccctttacatctgaatatgatagactatctctaagtgtttctatttctgatatttcttcagaatttttttgattttgtttcattgaattaatttctttatctaacttgtctttctctttggttaattcttttatagattttcttgtcatttttatttcttttcttattgacttgtctttgcttgtataaactgtttcttcattgctataatctctaaatatggttccaacaagtatacctaaaatagtacttgctagtattataaacacatattgttttttcatactgtattgctccttacaaatttatttttatatgataattttctttaattaaatattaaacatttacatatgcttattatatcaaagttatatattaaaattcatctttagtatataatatcatacattgaactcctatcactaatttaccaatatcaagtatgcatttttagatgttcttaaaattatataaactttcaataaacattgttgtgatattataaaaaaacataaattaggaaaggaaataataattatgaaaaacaaataatggctttggagattattaatatcattttttagcaaaaaaaagtaaaatggcatagcctcaaagctacaccaatttactaaaaattatattattattaacattaattttaaacatatacgtttataagttttcctcatattttaaaattcttttaattaacttatctcttaatttccctacttcatcaaatctcatattaggactatagtaactttctataatatcatgtttagacttggctctcttaagatttagtactgcccaacaaattaaatcatctaaaactttttcatcaaatttaatatcttcttcatatttaagtagtttttctctatttaaaaactgatttaaatcaattgtatcttcttctttaaaagtcgtacttatagttatgcctatatctaaatcagttaatagtacagtttcaattttctctggaataagtggataatgataaacttctacatttaaacctttttcagtagctttcttatatactttgtttaataatgtagttttcccagttcctatttctccatctaaataatagactttctttacatcttttaaaatgttttctgtataatctaaacaccctacaggagttatagctgaaccaaataaatgcttttctctttttagatttcctgtgcttttaactccatcaaataacctttttataaattcttctgtgaccaaatttactttgccataatccatacaatcagaatatttttcttctatgtctctaaaaattggttctgctgactttaaaaacttaaatgctcttttaaatgaattactaatatctttatcataaactgatatttcttgtttattcttttctaattcttctgtattccagtaatcacctaaattaattatctcatccaaagctccaggtagctttgggtccatagtatgtggggcagttgcatccataagtaccacgcctaatttctttataactaaaccatccaacgaacttgggtcagaaggacaatgatataaatcaatatcatatcctctatgcaaaaactctttataaatttttttcataagtgaggattttcctactccaggtccaccctttaaacaaaaaactctttttacattttcaggaattatatagtcaaaaaaagaatatgagccttgtgatgtatttccacctgggaatgccttctttacctttccttccatattagcgcctcctcataatttacaatatctcttaattaagatattcatattataagaattttattacagctttctgattttgacaaatttaaaacttaccatctaatactaataacatattaattttatctaattattatagattctcatactgtaccttattctatctataaatacaatttaagtgtccatattgaaatatttgtattgtaatacagctggatattacttaaatccaattgtttccattataattttatgttaaaataatattacaaaatacatctgtttttcttcataaacgggtgaaattccctatcggcggtaaaagcccgcgagccttatggcataatttggtcatattccaaagccgacagtaaaatctggatggtagaagaaaatagtatatgagtacctttatgtaattttacatgagtaatctatacaaatccttcaactaccgtatttattcatgaaattagacacattcaaggtacctaatatacaggtgctttttttgttgtttattttacaattatatcgtacttataaaatctattaagattggagtgttatcatgaaacaaaaatggatagtattgattatcatctgtattggtgtatttatgtctactcttgatggaagtatactaaatatcgcaaatcctacaattgctgctgactttaaaattaacatgtcacaaattcagtgggttgtaacagcttatatgcttgttgtaacagctactatgttatttttcggaaaacttggtgataaagtaggttcaaatcgtctatacgcattaggattttttatatttacaataggttcttttctgtgtagtatgtcaaacaatttatcaacattaatttcttcaagaatctttcaggcagttggagcaagtattttaatggctactgggcttggtatagtttccaatgcatttccagcaaatgaaaaaggaaaagctataggaatcactggagctgtagttggtataggaaatatgagtggtcctgtaattggaggtataattttagaacattttggatggccttctatttttattatcaatatacctattggtattatagcagtctttcttggcattaaatttctgcctaaacctgttttggatgaacaaaacaagagctttgatatttcaggtcttctacttttcgcatcttgcactacgcttatattacttgcaatgaatgagaagggtaatacaagattgtatttaggtataacagcacttataatcttcttattgttggcattaagagaagtaaaatttgaacaaagctttattgacctacctctatttaaaaatagaaactttactgtaggcaatatcattggagtagcttgttattttcctcaaatggcagtatcttttctacttccattttatttagaacaattaaaaaatttatctcctatgatggctggttatgtaatgactgtacatccacttattatggtacttatagcacctattgcaggttcactttctgataaacacggtgcaaaaaacattctaacagcatctttttcatttatgaccatctcactagttggaatggcacttttaaaagcagattctccattgtatcttttaattgtatgtttagttatttttggacttgggctaggagcatttagttcaccaaacaatagtagtattttagcagatgttcctcctcaaaaacaggggtacggaggcagttttcttgcaactattcgtaatttatcatttgctcttggaacagcattttttagtagtttttttgcacaaagtcttacatacaatcaaaagtttaaaagtcacacatcagcctatgttatagctagcaatcagtcttattggattgcagcatcagtatgttttatagggcttatactaactgttttctttatgagaaaaacagataaatctatttcttaaatgctatttattgctgactacataagtcaataattttttagttgaactaatttatactaattttcccataccttactaaaatttattagtatttagcaaaattactgatatttattgtttataaacaataaggatgccaaaaaaagttcattaaaactattttaaggcatcctatattttgctttaatattaatataattaaaactaactattattacatttattattcaaataaatcttatgtcaatatttaacattttaaatttaatctactgttatttcatatccatgttgattgtattgatttacaatctcttcccataattcttcaacaccagtcttttttagtgaagaaacaggaattactttttcactactttccatttgcaatttttttcttattatacttatgtgtttttgatattgtcctctagatattttatctgccttagttgcaataactacacagttatatccaaagtgctttatccattcatacataagcttatcatctgctgtaggctcatgtctaatatctacaagtaggaatatagaacataactcttgtctactttctagatatctttccattatacctccccacttttctttttcagacttagctatctttgcatatccatagcctggaaggtctacaaaataaaattcattatttattagataaaaatttatagttctagtttttcctggtgtttgactggttctagcgaagtttcttctgttaagcaatgtatttattattgatgattttccaacatttgacctaccagccaatgctatctctgggattccttctgctggatactgtgatttattcacagcactcatagttatctctgaacttctaattttcattattttcaccactctttaataaagcttgttctaatacttcatccatatgttctacaagcacaaactccattttttcttttacattttctggtatttcatctaaatcagcttcacattctttaggaattaatacttttgttataccagctctatgagctgctaataacttttctttaacccctcctactgctaagactctacctcttaaagttatctctcctgtcattgctatatttccaggaacaggtcttttagtaagtgctgagattactgcaagagccatagttataccagctgatggtccatcttttggaacagcgccttctggaatgtgtatatgaatatcattcgtcttataaaattcagggtctatatcaaacttgtccactattgaccttatataagagatacctgtcttcgcagattccttcataacatctcctaattttccagttaatacaatttctcctttacctttaagtacgtttacttctacttcaagtgtaactccaccaactgctgtccatgcaagaccatttactaatcctatttgaggattaacttctgcaagttgatacttaaacatgtcttttccaagatatgtctctaggtcagacttatttataacaacctcttcaagagttgggtcttcaacgtattttttggcaacctttctacaaatcttaccaatagttctttctagtgttcttacaccagcttctcttgtataatggttaattatacttcttaaagtttcatcatctatttttataaagttttcttttaaagcatgttctttaatctgttttggaagtaggtattttcttgctatatttaatttttcttcttctatatacccagatacttctattacttccattctatctaataatggtcttggtatattacctagactatttgctgttgtaacaaatagtatttttgataaatcaaaaggtatttctaagtaatggtccacaaagtccttattttgctctgggtctaatacttctaacattgctgaagctgggtcacctttataatctgctgccatcttatctatctcatcaaataagaatacaggattttttgtttgggcttcttttaccccattaattattcttcctggaattgaacctacataagttcttctatgacctcttatttctgcttcatctctaactccacccaaagatattcttacaaattttctatttaatgctctggcgattgattttactatagatgtctttcctgttcctggaggaccaactagacatattataggccctttaagtgacttagcaagagttcttatagctagatactctagtattctctccttaactttttctaatccataatggtcttcatctaatatatcttttgccttagttatatctaatttatcttttgtctctttattccatggcaatgagaatatagtatctaaatagtttctacttacagatacatctggagacatagaagatatttttgaaaatttatctatctctttttctattttttctttggttgtcttaggtgcttttatttttttaagcttttctctatactcatctgcttcagaatttatatcttcttcttcacctaattctttctgtatagcttttaattgttctctaagataatattctttttgaaccttattcatctgtttttttactcttaaagttattttcttttctatttttaatatatctatttcctctaataatatagaataaataagttcaagtctttttctaatatcaaattcttctaatatttcttgtttttggcttgattttagatatatgtttgcagctatcgtatctataaatctatctacatcttctatatcagctagagatattaatatttctggtgataccctatttccaatatttatatactcttcaaaggcatcaaatacatttcttacaaatgcttcaatttcaacttctgtttcactatccaaattatcactattaaatactatttcttctattactgctctgaaatacccatcttcttgttctattttctttactctaccccttgatacaccttcaaccaaaacacgaactgtatctcctggtaattttatcatttgcttaactttacagattgttcccacatgataaaaatcctcttctcctggctcatctacctctgcttctttctgagaagttaaaaatataagttcttcatccatcatagcttggtctaaagctttaagagatatctctctacctatatcaaaatttaatatcatatatggaaatatagctaatcctcttagaggaattaatggtaattcatgatctattttagtataattttgttccatcaacattactccttttctagtctaattgctttgcttttaatattatatatttgaacaagttaattttcaacattaatgataaattcttagaatactatcatactatattatctttttattatgatataatattaatattagtatacttagatgttatttatcttttggaggtttctattatgttgaaattgtttttaacctttttaaaaattggtgcgtttacatttggtggtggatacgctatggttcctcttatacaagatgaacttgtaaacaaacaaaaacttttagagcaggaagaatttattgattatttatccatagctcaaagttatcctggagtactggcagttaatatatctgtattattaggatataaactttatggtataccaggagttcttatatgtaccttaggctctgctttaccatcattttgtatagtcttagtcttatcgtatctatactttaaaaattcatcatctaaaattttagatggattttttaaaggagttgcgcctgttgtaatagctcttatattgtattcttttacgagcatgttcaagaaactaccaaagtctaaaactaacatactactattaattatagcagttttatctgttggtgtattcaatataagccctatttatttaataattggaggaggtgtatatagtctatgtcagaaataatactactcttcttaatattccttaaaataggggcatttagttttggtggcggttatgccatgctaccatttatccagcaagaatttatatctaaatatcactttataactaatcaagagtttttggatttacttgctatatcacaatctacaccaggtcctgtagcaataaatagtgctacatttgtaggatttaagactgctggcttctttggttctctagctgcaactattggtgttacaatttttgcattaataggtctaactattatatcaaagttattttctaaatttaaaaataataaaaaggtagaaaacttattgacagttcttagaccaattactctaggattcatattatcagcagctttttcatctgccaaagaagttaattgggatttatatggaataattgcatttatagcatcattttatcttttatataaaggaaaaattggttccattgcaattgtattcgtctttggtattctaggtatattactcacatttttatgataatgatacctattttatatttagcatattaacataaaaaaaggagcttttaaagctccttttcatcatcttatgcactttcctcttgatccttaagtactatgataggatttactgagtcttcgttcacagatttctctgttactataaccttctttatattatctctagatggtacttcaaacatagtttccatcattacgctttcaactatacttctaagtcctctagctcctgtatttctttctatagcctttttagcgattgcacgaagagcaccttcttcaaattctagctcaacatcatctaactccaataactttttatactgttttactagagcatttttaggttcctgtaatatctgcattaatgcatcttcatccaacaactctaaagtagctaaaactggtattcttcctataaactctggtattataccatattttaataaatcctctggaagtactttttcatacagcttccctaaatctaattcttttttactttctattttagctccaaaacctagtgttttatctccaccacgtttttgaattatcttctctaatccatcaaaagctccacctaatataaataatacattagtagtatctatctttaaaaattcttgatggggatgttttcttcctccttgtggtggaacatttgcaacagtaccttctaatatttttagaagtgcttgttgaacaccttcaccactaacatctctagttatagatgggttttcagattttcttgcaatcttatctatctcatctatatatattatacctctttcagctttttctatatcaaaatcagcagcttgaataagttttaaaagtatattttcaacgtcttctccaacatatccagcttcagtcaatgatgtagcatctgccattgcaaaaggtacatttagagttcttgctagagtttgagcaagtaatgtctttccagaacctgtaggtcctaataaaagtatattactcttttgaatttctatatccttactactagattttttactgtatattctcttataatgattataaaccgcaactgataaagcttttttagctttttcttgacctattacataatcatttagaatctccatcatttcctttggttttggtaaagatgtagtatcttcatctatagtatcttctatttcttcctgaataatttcgtcacaaagttcaacacactcgtcacaaatatatacatttggacctgcaattaatcttcttacttgatcttgatttttaccgcagaatgaacactttaattgtcgtttttcttcatatttagacatattaacacctctctctatctacggtctctttgtaaatacttcatctattaaaccatattctttggcttctagtgcactcatgaagttatcacgttcagtatccattttaattttttctaatggctgaccagttctttcagataatatctcatttaaagtttcttttatttttaaaattctctttgcatgaatttctatatctgttgcttgaccttgagctccacctaatggttgatgtatcattatttcactatttggtagtgctagtctttttccttttgctcctgctgccaacaagaatgctcccatagaagcagccatacctatacatatagtacttacatctggtttgatgtattgcatagtatcatatatagccattccagaagttatacttcctcctggagaatttatatataaatgtatatctttgtctgggtcttcagcttctaaaaataatagctgtgctactataagccctgctgtggcatcgttaacttgatctcctaagaagattattctgtcttttaatagtctagaaaaaatatcataagatctttctcctcttcctgtttgttcaacaactacaggtactaatgccatggtttcataccccctttattctatataatttacagtagcttttttaagctactgtaaattattatacgcatttaactaaattatatttgcacatcattatatactaaacatttcataacgtcaactatattagttagcgtttattttattaagctattgttgcattatcaactaataaatctattgtttttcttatttttatttgaccttttatatcttctttgtcagcatctcttaaagaagcttctattttttctacttccatattgtaagcagaagccattttttctaactcagccttaaattcttcttctgttgcttcaattccttcagctttagttattgcttctaatactaaagaagacttaactaattttttagcatcttcttttctctcttctcttaattcttccatagttctaccagtcatctctagtaattgttgtaatccaaatccttgatattgtaattggtagttaagttcatttaacatattatctatttgatgttgtatcataacttctggtatttctatttctgtattttcagcaactttttctactactgaatttctagtttctgcatctgctctatttttagcttcttcttctaacttagctcttacatctgcttttaattcatctaaagaatcaaattcactagtatctttagcaaattcatcatcaagtgcagataattcttttacttttacatcatttatttttacattaaatacaactggttttccagctaaatcttgtgagtgatattcttctgggaaagtaacattaacttctacttcttcaccagcttttttacctactaattgttcttcaaatcctggtataaatgtgtttgaacctataactaagttataattttcacctttaccaccatcaaaagctacaccattttcaaaaccttcgaagtctattatagctgtatctccatcttctaaagctttgtcttctacacttactaatctggcatttttttcaaccatttcttgtagtttagcatcaacattttcgtcacttacagtattctcaaccttagctatttctatacccttgtagtttcctaattcaaactctggtttaacttctacattaagaaccataaccaacccattatctttacttatttcttctatatctaaatctggattgtctattgggtctatgtctaattccttgatagcttctggataaacttctgggaataatatttctatagcatcattgtagaatataccttttccatattgagtctctataacaattcttggagctttaccttttctaaatccaggtatattgtatttatttctgcttttattataagccttatttactgctgcttcaaatttattgttatctactgttatttttaaagtaactttattaccctcttttttaattagttctgctttcatccttctaatcctcctagtgatatttatgtaatacccgataacggtattataattcattctatttataattcaaccacttaattatatcacataagtttttttatttacaagtgttccattaatatcgttgtacttatttgataaaatttaattttttgagcgttttttgccatttttttagataaatacacctttatatgcgtatttcttcaatttttatgtcatcttcttctatatccataatgacaaaacttttatacgatactcctcttggaagtgaagtgcttccaggatttatgtaaagtacaccatctttaatttctctaaatggggtatgggtatggccaaatataactatatcagcatcaacttcagttgcctttttttctaacatattagttccatattttacaccatacttatctccatggcataagaatatggttttatttgccacttcaaagacaacttcttcctcaacagcatcaaagtcacaattacctttaactgcaataatacctacattagtcatgctatgaatatatcttgaatcagtaaagttatctcctgcatgaattattaggtcacattctttcaaatatggtattgttttttccatatttttaatcatcatatgtgtgtcgcttactatgcctattttcattacttcactaccctttttataaactcttgtttcataagttttagtgcgtttgctctatgactgattgaattttttataacactaggtatttcaccaaaagtcttatcatatccttttactataaataagctatcatatccaaaaccatttttacctttttcttcaaatcctatcattccttcacaaattcctcttactacaaattcttttccatcaggaaaaactactgctattgcagagacgaatcttgcatttcttttgctcattggtacattttgcatagcttttaacagtttttttctattttcttcatctgttgcatgttctcctgcatatctagctgaataaacaccaggttttttgcctaaagcatctacttctaagccagaatcatctgatattgctataagtttagtcttttttgctattgctctagcttttatcaacgcattatgctcaaatgtttttccatcttctactatctctatacctgctaaatcaacatcttttaaagagtacactttatattcaaaatcttttaagatttcacctatttcttctagcttatgagcattattagtagcaatcactacttcattaccataatccatacccaatatctcatctgctatttcacctaaagcttctctttgaagccttattaattctttattccctttttcgcctaactctaacaataaatttaaatctgctcttgaaaaaggtttctcttctcctgtcccctgtacttctacaaactcacacttatcagtcattattatattcatatctacctgtgctttagaatcttcttcataacataaatctagcatgtgtattccatttacaataccaacactaattgcagatacaaaatttgttattggcatctcttttattgtctttgctttatataatttatatattgcttctgcaactgctacaaatgcccctgttatagatgcagttctagttccaccatctgcctgaatcacatcacaatctacccaaatagttctttctcctaatttattcaagtctacaacagaccttattgctcttcctattaacctctgtatttcttgtgttcttccatcaatttttcccctagatgcatctcttatctttctttgttgtgttgctcttggtagcatagaatattcagcatttatccatccagtaccactatttcttaaaaaaggaggaactttttcttccactgatgcagtgcatataacctttgtctctcccatttctataagaacagaaccttctgcatactttgtataatctctagttatctttacaggtcttatctgttcgttacttctatcataacttctggtcattttttatatcctttctcatattttttattttttataaatttatttttataatttttaattttgtcaaatattaattattgtcatttttcgtaatcttattagcttactgaactattctatcattaattatagtagttttctactaaattaagcgactttttaactctctaatacagcttttacttcatctttcgatgataactttaataattctaaaaatctctcttcatctataactttaattcctaaatcatttgctttagtaagtttagaaccagcttcttcacctgccaaaacaaatgttgtcgatttactaacactagatgtagcttttccacctcttttttctatcatatctttcgcatcatttctttttaatgtaggaagtgtaccagtcaatacgattttcatcccttcaaatattttttctactttttcacctgtattatccaatgattttgtatttactcctacattttttaacttgtttataacgttcatatttttgtcttccttaaaaaactcgacaacgctgtttgccattatacttccaaattcctctaattcttctagttgctcactagttgcagaaattacttcatctaaatccttaaagttatatgcaagtatcttagctgctttaactcctataaatttaatacctaatccatttataagtctccataaatcattttcttttgatttttcaattgaatttattaaattgtcagcagatttttcgcccattctctctaggtcgactacatcttccttttttatataatataaatcagatacatcttgaataattttttcatttaatagcagtgtaattatagattctcccaatccatctatattcattgcatcccttgacacaaagtgtataattccccttcttatttgggctgggcaagacatattgatacattttacagcagcctctccttctaatcttattgttggctctgaacaaactggacacttttctggcattttaaaatctatttcatctccagtacgttcctcttttataacttctaaaacttgaggtattatgtcccctgctttttgaactaatactgtatcatttatttttatatctttttctcttatataatcttcattgtgaagtgtagctctacttacagtagtacctgcaagtctgactggttcaagaattgctgaaggtgttattgtaccagttctcccaacttctactattatatctactattttagttttcttcttttctgctgggaatttatatgcaattgcccatctaggacttttggctgtatatcccatttcgtctctttgttttatattgtttacttttattaccataccatctatttcgtagtctaaattacccctgttatctgtccagtattcaatatgctcaataacttcatctatacttttacaaactttataactctgacttactgaaaatcctagtttttctaagtactctagtgattcactgtgactttctaaatcatattcttctatattttccatattaaatacaaatatatctaatggtctctttgctgttagttttgggtctaattgtctcaatgaaccagctgcaagattccttggattagcaaataatggctgttcttgttcttcttgttgttcatttacttttctaaaattatcttttgatatatatacttctcctctaactattagttcttttttatcatttatcttaagaggtatgctttttactgtcattaagttttgagaaatatcttctcctacaactccatctcctctagttgctcctttttcaaactctccattgttataagttagacctacagaaagaccatctattttaaattcaacaacatattcaacattttctcccacatattcttgaactctcttatcaaaatctctcaaatcttgctctgaaaaagcatttgataaactcaacataggagttttatgtacaatttgattgaatttatctaatggcttacctcctaccctatttgttggagaatcaattctctttagttctggatgttcttcttctaaagaaattaactccttcattaacttatcgtattcataatctgatatttctgggctatcttgattataatacctttcattatggtagtttattgtctctataagtttattaatttcatcttttacgctcactttttgcacctcttcatatttttaaaattaaattattttgaaatttccctataattaattatctcctatttatatattttttagtatatcacttttttgactttaaatttattacaaaaaaaactcttattagtatctttaatacgactaataagagtttttatttttatcaaaattttttatttttaatagcctcttgatatgtctacaacattatctacaggtttattctccattatatagtgtttcaaattattataaaccatattaaatgttctctctttgtttttatctgacacccaagaattatgaggagttactatgacattttcgcactcccacaacttattgtccttgtttaaaggttcactttcaaatacgtctagtgctacccctctaaatttctctacacattcttctaaatctttctgattaactgtatttcctctacctacatttataaatacagaaccatctttcataagtttaaacatatctttgtttactattccatctgtactttttgtagaaggcattgctacaactactatatcacattcttcaaatacaatattcatatcttcagtagcaaaacacttatcaaagtattttttactacttccatcagtattgacaccccatatttctacaccaaaagcttttaatcgttttgctgcttctgaagatatagtacctgttcctaaaaatccaactctttgtccatacaattctgatacagaaaaatccatcttccattctttattttgttgttgtttaaaaaattttgcactatttttatatatttctaaaatatacaatacaatactttcaccaataggtacactatatccgcctctattattagctatcttaatatttctcttcaatacctcttcttttggaagttggtctatacctacactagttgtctgtatatattgtaaatttttcatcttagaaatatctaatctctcaaatggattgtatgtaactagtacatctgctgtatttacatcctcattattttcaatactatcttcagagtaatgtatgacatcatagcctaattctcttattttatcaaatttttcttttccataatttattgtaaataaaactttcatctcaaatctcctctatctacccacatttaaaattttatattctaaaatataatatgatactcaatgtacattagttaaaattactataagatatcttaaatttacttatgttcaattgtttttcctaaagacatagcattacgttcttgaactaaattttctattaaattattcaatgtccaatcaatagatgtctctgttaccatagctgtaaaaggtctatttattctcactttttttagaccttctaaaaatgcatttacttgtgtgcttggagtgttattaaatattacagacttactcttaatcccattttcacattcacttgatatatttccatctaaaatgtctcttattatattctctccgtttttttcacttaagattatatggtctcttattccagcaaagttacttacgtttttaattaatgataattcttttttattaaagtttacaagcataatacacttcctattgtgtattttatctaggttattattatttattttttcaaatgacattttatccatcctttcatttatttatatactttaatttaccccatacatttaaaataatcaatttttatagttaatttttatattaatacccaaattacatttaaatagttaggctatccaaaactaatatataaaattagaataattagattaatatctacaaatcataacctaaaggagagataccatgaatacattactaaacaataaatttagcattaaaaacttttcaaatgcttgggttatagtacttggttgtatgttaatacaagctgttccatttagtattgtagcaagtatacagcctcaatttataagttatgttgtagaaggagaaggctttagtttagcttctttttctctaatattcactattggtactattgcctcagcaattgcatcaccttttataggtgtattattttctaaagtcaatattaagatactatatttattaggttgtataatttctagtattgcttttgctactttttctatatgtactgaactatggcaattttacactgtatcatgtattgttcaaattggcgctacaattatatctgctataggaatacctgttttaataagtgcttggtttgatgaagaaagcaaaggaaaagctttgggctttgcttttgctggtggttctattggtagtatatttctacaaccacttgcagttcgcttattagcaactcaaggatacagtcattcttatctaatatttggaattatagcattaatagttggtatacctgtaatattattcatactcaggatgcctaaagatattaatgaaaaggtaaaatctaaaggtaaaaaagagaaagcatctgatacaatttctccttcagtatggggttatacattaaaagaagctaaaaaaattaaatatttttggattatgactattggatttatatttgttggtatatatgtttcatcattatccgtacaatatccaacttatcttagaaattatctaaatcctattctaataggaacagtaggctccacatttgctttatttgctctcattggtaatttatttggaggattattgtttgataaattcggtcaaacaaagccacttattatatcttttgtattggttcttatagcaactttatcattactattggtagataaatcttctacttttgcatttgtatttgccattttgaaaggtctttctgtatttgcttatatgattggtcctgcttatttaactggctctttctttggtcaaaaggagtttggtagcatatatggaatcgtacaattaatttttgcagtgggatttgcattaggttcaacattatttggattgttagttgataattttggatacagattttcttggtctattataattttatcagttataattgcctatactttacttattataacttctataggaatgaaaaaattgaataaagaaagattagataaactaatgcaataattgatttttagatatataaatattataataaaaaagatggagcttttaatcataaataaaactccatcttttttatattacaatatagctaattttctcttatttttaactttactatctatatcctcatccttaactatagtaaatgccttagttggacaaacatttacacatgcaggcccttctggcgattctatacaaaaatcacacttatttgctgtcattctttctctaaagcaaagctttccttcatctacatcttttaatgtaactatgtctattgcacctataggacatgctaacatacaagtcttacatcctatacaattttcttcatttatttttattgtgttcccaaccctaactataccaccatttggacatgcctttgcacaaggagcatcttcacaatgtctacactgtattggagcacttacttcttttgtctttatgacagaaagttttggattaaaatttatttcatctggattttggtaaaaaatatcttcatctgaatgtgcaactacacatcctatcatacaagttctacatcctatgcatttatcagggtctgctataacaaaatagttcatcacttagccacttcctttcctatacaatatgtagtgtgtaatagatgatgagatttttctcctaatggttctaccagatattcatcatacagttttttaatatcaggattctcatgagattttctaattgctaaatgttcatcatgcacgtatgttgcttttgttctattttcataagccaattccttatattcttctagtaaaatttttggttgacctccaccacttacacacccaacaggacaagtcataacttcaataaaatctacatctaattttcctttttccaagtcttcaagcactggtattacattttttaatccacttactactccaactcttaagtctaagtctcctattttaatagttgactttctaaaaccattttctcctcttacttgttttacttctacatcaggaatactttctccagttataagctcatatcctgttcttatagcagcttccataaccccaccagtaacaccaaagatagttccagctccactataactacctaaaggactatcaaatttttcttctcttaaatttttaaaatcaattcccatgtcttttattaaataagctagttctctagtagttaatactacatctacatctctatatccactagaatccatttcttctctatcacattcatattttttacatgtacatggcattatagaaacactaaatatctttgatgcatctacattatttatctctgcaccataagttttaaatattgcaccacccatctgctgaggtgatttacaagaagataaatgattagttaatttaggataatttttttccatgaattttacccaagctggacaacaagatgtaaacattggaagagttccaccttctgtcactcttttaattaattcactaccttcttccattatagttaaatctgctgcaaaattagtatcgtagactctatcaaaatttaaagctctaagtgctgctgccatttttccagcacctaagtatcctaaataatatccgaaatcttctcctaaagcaactctaactgctggtgcacattggaccatagtgaatacatttgggtcacttaaagctttctttaccttatctatatcacatacattgtatgctgcaaatataggttcatttatagactctggtatctctctttcttgttttttctcttgtaaaaactcaaatccttcatctataactgaggcataagatttacaagtttgaacacattgaccgcacataacacatctatctaaatttatctcttgtggctttccctcttcaccttcaatagcatttactggacagacctttgaacattctctacatccagtacataaatccttatctatatttattatcataaacgtcacctacccctgtatcctttatttatttgttaacaataaactaagtgcagcttgtctattcttagcttttttgtcatctattggagtaacaagttttaatgcttcctgaggacatgcacttatacaagctattttttcattgtctttacataagtcacatttataagctatcttcttattttcatctaaaattacttgttctacttctttaccatcttcatattgtggaagtaagtctatagctccaaaaggacatgctagcagacaagttttacatcctatacacttttcttcatttacagacataatattgttttctttgactatagctttttgtggacatgagtttaaacaaggagcatcttcacaatgtctacactgtattggcatacagaaattgtcaccttttactaaataaagtctaggtataacaggtatatcaactgttccaactgtataacccacattattatgctgattatgcattgtaaaacaagctacttcacaagctctacaacctgtacatttgtttgggtccgctattacaaaagagcctattttatttttcatattatcccacctttcaatttgtatatttccaaccctctagttactttcatcatatgtctacttactttcatcatatatatttatatatttcactattttctcagtacttatatttcgtttacattttttgcacaaattgtatgtgttattatacaccttatcagtatcgtcaattaatactccacagatttcacactttgaacatttttgttcttcttttttagtacacatatacttattctcactttttgataactctctgtggatttgcataaatattcatccgtcttcctcttacaaatccaataagcgttatatttaattttttagaaagctctattgataaattagtcggtgctgattttgatactacaataggaatttgagtcatagctgcttttaatatcatttccaatgatattcttccacttacagccacaattttatcttttaatgttatgtcatttaaaacacaaaatccaatagccttatccattgcattatgccttgctacatcttcacaagtgactatttttttatcaaaattaaatacagatacgctatgtaccccaccagtatttttaaataattctgatgaatttaaatttctatccattatactgtaaatcgtatcataatttatttttatattgctctttacagaagcacatgttatatagtctagtgaatttaaaaatataatttgctcatcttgatttttttgtttctcttgaatagttacttttgcaaaacgttcactctcatttatctcaaattttaataagctttttttgttttctatgtatccttttgttttcaagaatcctactataagttcctctaaattatatggggtacataaaaatgtatttacatatttatcatttaaaataaaactaagtggatattctgcaattatttcttcattatctattgatacttcatgttcatttattttgcttacttctacattaaaagaatttaaatatttgtagtccactagactataactattttcaaaaactttatccttactattttcttgtaatttagtttttgagtatatattgttcataaaatattagcctttctgccttttataaatcttaaatctaataaatcattagatatttgtagctgtcattttgtctttcaaactttgatactcttctcttacacatttttctgctaattcttggtcttcaagtttttcaagtttaacagcacaatatttatactctggtgttttagatatagggtctaaatttgctattgtaagttcattgcaagctccaacccaccactgataagtcatatatgttgcaccttccttaactctatcagtaactgttgctcttgttattacacttcctcttcttgaactaattctaactaattcatcatcttcaattcctaatttttcagcatcattagaatttatttgaacacgtcctggttcatcttctaatgaactaagtgttctacaattaccagtcattgttcttactgaatagtgtccaacttctcttacagtacataaactaaatgggtattcatcatcttcaacttccatagggggtctccattcagcagcgaacaaattacctttaccattaggagtagaaaacttttgaccttcatacagatacatagttcctttatcttccatactttcactcttacaaggccattgaacgcatccttgagtttctatcttttcataagtagcacctaagaaacttggacataattgtctaagttcgtcccatatttccttagtatttttataattcataggatatcccattgctgtagaaatttcgcttataatttgccagtctggttttacatctccttgtggctctatagcttttctcatcaattggaatcctctatctgcacatgtatatactccctcatgttctccccaagaagtagctggaagtataacatcagcgtgaagtgctgtcttattcataaatatatcttgaacaatgacaaattccaattcatctaatgcttctctaacttctgatgcatctgggtcactttgcactgggtcttctccaaatatataataagctttaagctttttctcttttagtactaagtctggaacttgagttaaactataaccattattaggagataattttaccccccaagttttttcaaacttttctcttatcttatcatcagttacattttgatagccaggatatacattaggaagagctcccatatcacaagctccttgaacattattttgtccacgtacaggtcctattccaacgctttctctaccaaaattacctgtaagtagagcaattgatgcaagtcccttaactacatcaacagcttgaccaaattgacagacacccattccataaagtatcatagcttttttcccttttgcatattctctcatagcttttcttataagctcttctgggattcctgtaatcttttcagcatatttagctgtatatggtttaacaatttctttatactcatcaaatccttgtgtatgattttgaacaaattctttattgtaaagaccttcttctattaatacatttccaaaagcatttactaaaaccatgtttgttccaccttttataggtagatgtatatcagcaattcttgcagattcagttactctagggtcagtaacaattaatttagcaccattttttttagcttttactattctatttgccactattggatgtgaatctgctccattatatccaaatataaataaaacatctgcattttctatctctggtatagaattagacattgcaccactacctaatgagtaagccagaccggctacagatggtgcatgtcatacacgagcacaatggtcaacattattagttcctattgtagctctcataaatttttgcattatatagtttgcttcattaccaggtcctcttgcagaacctgttcccataatagaatcaggtccatatttttctttaatttcatttagtcttgaagctgtatagtttatagcctcatcccattcaacctcttctagtacaccttgttttcttatcattggcttttttagcctaggtgttagaattttagggtcatttagaaaatcccatccataacgaccttttaaacacaaactttcttgatttgttctaccattagccggttcagctcttaatatcttattatcttttactactagatataattggcatccagctccacagtatggacaaactgttaaaatttttttctccatacaattccccccttagatttatcccctgataagtaaaatttatcttaaagataatgagtgtttttataatatgcaaaatcataaatattttgcaatactatctattaaattcaacaattttctcacaattcctcttaaatttcaaaaaaaatatgtcataataatctttatatttcaaccatttaattaaaatattctagttcttatgacatattttttaatatactcaatatatattctttaaacttatttagttttcacttaaaacaatatttctgccaattctatttttcattctatagtgagtaattacagtaaatattccacttccaatcagaattaaatagtacataaatccaccatataaaaatactgcatatcccatcaaaggttgagggaatactgatttgaatatagtgaaaaaggctaattcattagctcctacattcccaggtgttggtattggagatattgccatatataaaaatgcttgtaatgtcagtatataaatatagctataaccttgtaaattaaatgctttatatatccaaaatgaaacactaaagtaagcacttaattgaataaaagttactattatagttgaaattaatacctttttattctttgcaaaaaaatttattgctttactataatcatctataaaactttctatggattcaatcttattatctaaaaattttaaaaacttaatttttgataaatgctttatagtaattctcataaaatattttatttttttagggtttaaaataactaatattatcataattaagacaaatgaattaatggctatccctagaaacactagaggcataatcattttcatttgtttttctaacatagcaaaattcattaatacaagtattgtacaataaaaagtaaccactatttggaaaataatagacttattggtaacaactgcacttgccttactaagtggcattttacattttttaagtacatatatctgtactggttggcttcctgaagcaaaaggagttattaaattataataaaatcccataatggctagcttaaaaccaataaatctaatattaactttgtgagtgctttctataattatcttcattactactccttcaagcattatgtgacacattattgccaaagcacctatgaataaaaacttcttatctaccataaccataacatttgatagcattttaatatccaatgttttaaacactaggtaaattgttatacctattaacaaaaataaaaatgtatactgtagtaaactctttctaatattctttagtctatccattagaaataaccatcctttgctcaagatttatactaaatactatattattagtatacactatgaatcttaatattttataacaaaataccttacaattttgtcatttacaaaaaatattaatctataaattaaattttaatatatagattaatattttacaaacattttgtagatatatataatattttcactaagcaacacttatacttattacacccatttataccctatcccccatacagtttctattgtataaatatcatattgttttaatttgcttcgtatattttttatatgctctgtgatagtacttatatcactttctccatcaaaaccatataccgactcatatattctttcttttgaaaatacttgtcccttattttttgctagaaattcacatattagatattcacttttagtaaaattaatttttttaccatcaattgaaacttctttgcctaaaaagttaaattgaacatttgagatagttaataaattctttttttctctactttctcgccttaaatgagcagttatcctagcccttaattctcctacaccaaaaggtttggttatatagtcatctgcacctatgccaagaccgtacataatatcactttccatattttttgctgtcaaaaacagtattggacaatcaaccttatttcttatagttttacatacttcaaaaccatccatcttaggcatcataacatctaatattattagattaaaataattaaaatccatgttcatagccttttctacatcactaattacctttacttcatgtccatctcttttcaacacattttcaatcaactttaacatatctaactcatcatctactactaatatcttagacataataactcctccatttatccgtttaatagtattctaatttatatctttaataatatctttaaaattcacattaaccataatactctcatattatagcttacaataattaattactattttacaaataaaatattttagatacaaaaactttatatttcaaaaactttatattcattttacacgcatttacttaaatataaaaatttatttaacaatttattattgtaatattttgaatatataataaaattaataataagaaaactttttataaatacacttttaattgtttaaattggaggaaaaaattatggatgaaaatataacaaaaaataattataatgttccatttgactatgttcgaaaaaaactcaaagaattagaccctcatacaattagtaatttaagtaatatacctttcaataatgatttaaatagattcacactcaatttttttgatagacaatatattatagactatccaagtggagaagtttggaatagtaatggtagcctttgcaataactttgagcttaaaatcttgatagttagatatttaatcaatgctaaaggtatccctagaactaataaatatgtaacttttaaagaaataccaggaggcaatgtttattatccaaattttttaaacaggactctatataggctttcagaagtttttacatctcaaatagacaaatataagttagttatggagaaaattggagctgaaaaagtaaacatgggagatttagcttataggtttacatatatgggtaatacatctatgatatttatactttggtttggagatgatgaatttcctccaaattcaaatatattatttgattctaatatagtttattacttcaatgcagaagatttagcagttgttcctgatacagctataaatgcaattttaaataaaataaatcaattataaatataaataatattataataaagtttttgatagatttaatagaatataatatgaaatggggtaaaaaatgaatgtagaaaatcaatctttatcagatattgaaataatattatcacacaggtatgataatggtgcagactattggactacacctgataagcgtttaataaaaggttctcctttctctactcttgatagtgtactttatctattagagttaggtgtgaaccctgatgatactttacttaaagaatgtgctgacttgatatttagcacatggcgagaagatggacgtttcaaactatatccaaatggaggtatttacccttgtcatactgcaaatgctgctaacgtactctgtcatatgggatatgcatctgacattagaatgcaaaaaacgtttcaacattttttagatacacagtatactgatggtgggtggcgttgcaataaatttagttttggtcgaggtccagaaactgaatactcaaatccactaccaactcttaatatattaaatgcattccgttttagtaattatctaaataaagaatcaaaacttgacaaagctgtagattttctacttgaccattggactattaaaaaaccactcggcccttgtcactatggaattggcacattatttatgcaagttgaatatcctttccgtaattataacctattcctttatgtctacgttttatcattttataatcgtgcaaaaaaggataagagatttttagaagcattgaagatacttgaatctaaaatgataggtaataaaattgtcgttgaacgtgtagttccaaaactatctaaattatctttttgtaaaaaaggcgagtcaagtgaaatagccacaacacactattacgaaatattaaaaaacctagaaaaataatagttatatagataaaacatattaaaaaatagtggctttaaattttttaaagtcactattctatataaatataacattataaaaaatatattaaactatttactcttttttaaaaccgttgattttcttgctatataaaaaactattattatagaaataactactagagaacctctatttataaagaaataattctttaattcattaaatctaacatctatattattaggcatataaaacatcttttgaatataaaatccatttacattaatcatactaacaaatgggtacatatgtaaaataaaaaatatatcagcaaatgtatatgtaattaatattgctattgttgtaaatctattttttgttaatgttaatatcattagtggaaatgttgtataccataataatgtaggaaatgtctttaaaaacacatctattggctttacactataaacaaaatctattttgtctatgttaaaacctttcactgacgtaaatgtatatactattgtaattgaaattaataataatacagtatatatagctaatataacacaccatctaaatactataaattgattatatttttttttattatataaagtaagtatctcatttatattacccaaataatcttttgaaaacacataaattattgtgattgctgacattattggtataaaaacatctgatatctttataattcctaaccatcctgctatagaatatgtatccattataggtacatcattataaaatattaactcattataatctaatatgcctgtaataaatatgcataatatagaaataattacaaatattaacacatgtttaagctctatttttttaagctcaaattttattaactccaatatacacatttattttaactccttatgtaaaaagtttatataagcatcttgtaaagttgtatctatccttaagctatccttaagtttctctgtatttttacctatatactttacttgcacaccatctttaactcttctataatcaataatatcaatattacgttctaaatattcaaattcatcattagaaactactactgaatacacctcaaccatatcaataaatttattaattgtaccatcatataatattttgccttgatttaatataattaatttgtcacagttaaattgtatgtcttctactatgtgagttgaaattaatactatagaatttttacttatttctggtaacaatcttctaaattcattcctttgctctggatcaagaccaactgtaggttcatccataactattaacttagaatcacctattaaagcctgtgctatacctagtcgtctctttacaccacctgagtatgtacctattttattatttataaacttgtccagattaacttttgatactactttttgtatatgtttctttaaatcattcttagatacacctctcattttagctacaaactctaagtattcttgcccatttatattattatacatatcaaaatcttgaggtatatatcctacatttgccttgattttctcattgtttttgctatactttatattatttaattctatctctccaattgaagtttcataaagagtcactaataacctcattaatgttgattttccagcaccattaggacctaataatgcaactactccatctgttagggttaaatttatattatccagagcttttttatttttgtaattaaaatttagatttcttatttctaacttgtttatcatattaacctcctttattatttatctattataaggatatttcctgaaagccaatgataaatagttatgctaattttctctccctttgagtcttcatataaaaattcattgctaggtaagtcagcaactaatatcatattaattttttttctttttattgattccataacattatctacttcatctacatattttttagcatctacagatgctttgctatcacctaatatttcatttcttgtttcaattaaaaatttaattttttcctctatatccatatttacattactatctgatggatagattatttttatatcatcttttacctcttctttaaactcacctgcatatattgcaatatcatttgactttccttcaaatatataatctttttttaaaaaattactagtcttattcagtaaaggtaaatttgaatagacattatttttagaacttaaatttattttataagccatacaacttgattgatttacttttgggtaccacgctaaagaacctggtggaagcataatatcatctttagtagctatatatttattttgattccaagatgtcaacacattaatatagccttcatactctatatctaatgtcacctcgtcattaggctctaaactttcctttaaattaacttcaattaaatccttttttttgttaaattttatattttccgaatttacttttatatattttatatcaaatatttcatctaaaatcatattaatatttgttaactcttcatttgatgtgtttaataaaacaattctatcttttatatttgacttgcttttaaagtcaatcttcatatcatgcgattttattttaatatcactaatattagatttctttaaatactctccataactacgttcctcatctctatatgttgacatatctattgatatataatttaatccaataaataaaatactgtacactactataactattaatgatttaatctgtttctttctaatatcatttaatatcagatatgctactattattaaagtaattgcaaatagtgtaggtataatcttatctataacatatgctgaattattaactttccctacaaaatcagaatagtaagcatatgattgatcttcaaatatattaagtgatttaaataatgctttaaaaaatggttctttaatatcaataactctatccaacatcttagttgatgttaaatataaaaatactgatgataaggtaatctttagtattaaattatttataataactgaaataaatgatatcactatagataaaatagtaagtggtaaaaaccattcaaataccaatataaatatagttgatttaatcgttacaattgataatgttcttattaaacttgagtatgctatagcatatataattggtatgcaacaaaatataaagttgtttctagttacagcaacagaaatacctaaaaaataatcaaaattatttctacataatatttttacagtatcataactttttctcatataaaaaattacatttaacatggttaaaatactaattgtcatacaagtatatacactcaaggataagtaatcattaaatgaaattcctctattggatatatgtgtccatcgttgtatgagatggtaatttataataataactgttattgcaaataaaatattttttctaattattttggttataaagtctgatataaccttaatactactcatatttatgcccctcctagccaatcctttgatacaacttacaatagattcaactatatttaataagttcaaatatttaccttgacattattttttaaaattaatattaattagtgaaattaattaatttagaaaatgttttataatcttactgatcattattaaccttcattccaatatatattaatatagcaatccaatatatagaaattattgcataaatcacatattgctgaaaaatattaagtattttacataaaataattaaacatattattacgaatagtattttttgcacagtctttctataatgctttttctcactttcactaagaggtttgtttctatgttctaaaggagctaacttgtaaattgttagtatactaataatcattaataatactaataaatacttatatttatttatatctatattattagctgaaaaaatagttatcaaataaataactgcaaatgttaatgtacactctttataattcctagcatgataacctcctgtgaactgtcttaaagtgcaataacaacttaaaaatataactgtatgtataaatctatcaaaaataattcctataaataatgctaccgaaatattaactatgaaataaatcaaagtttcaaatccatatctatatatttcaaaatcttcactttctacaatctcattattaactaatatattggcaaatttatatgataatcttttaaacatatttcctcctcaacatgtaaaacctctcctttaataagaagaggtccttttattaatgttatttttttagtttttgtaaagcttgtggctcttttgcctgatgtgctacccaagaacttgcactgtttgctgataatacagctatcccaaaacttaatgctgagatgtttttaagtaagtttaacgctatttttttcattttgtactctcctaactttttattggtatcattatttttaatataaactcattatctgagtaattaactattgtttcaccaccatatttatttactatatatttaatactagcaagtcctattccatgtatcttatcatcatccttactagtttgaatacgtttatcaataagtttaatatcatttaccttagtatttataaattttattattgcaaatttatttatatatgtagctttaacttctattcttttttctagctcattatttatatccatacatgcttcaattgcattatctagtgaatttgcaaatattgaacatatatcattattttcaataaagtttaatttagatatatttatgttatcttcaatttgaatatcatactttttacaaatacttattttttctgctaaaattaaatctaatgttttatttccagtatttttaaaatgttcaaattcacttatctgaaactctaagttatctatatatgatataatttcttctttagtgtcataattttttatacaaatcatatggtttttcaaatcatgataaacatattttaatctatcatgaacttcgtttatattttcataattcctgtagtttgtttttattctttcatttataagttcatactctagatttaatttatcgtcttgtacaattttccctattactattaaaagtattatacttgatgataaaatcaataaaattgcaaatataaatataaataagttttctgtagtaattgtattgactcttaaattatattcaaatataagtaataagctaactatattagataatataggtattcctattagtatcatatctttaggtttaaaatctaaagataatttaaaatacttaaacaatataaaacctataaataaaaatacctttgacataataatagcttgtattctaaataagttttcatgttgtgttatgttaatattatttaatttatttataaatactactagacctactgcagaaccttcagcaatcattaatcctagccaaaacaataaactaactattatacttttatatattttatcttcatatgatgttatataaaatgatattcctattaccatacatagaagaatcttaatatttggaaacactttaactacatttatgtatgccataaatataaatataattattgttgtaaatatatatcttatattagatattttcctctttccaactaagtggattactaaaaaaaatataatccaatctatagtacctgaaactaaattaataatattccaaaatcctatacttagatttgttagcatactatatcccctaatatattagttatagcaagtttcaagcctttaactctatatttacttattggaatacttttgccatctactataacagtacttccactcattgattctactaattttaaattaactatatagctattatgacatctaaaaaatccatattcatttaatatcttttctattttagatatactcattttagtaatatacatatcatcatgtgtataaatcaatatattcggtctatctgtttctatataagtaatagaatctattttaattcggtctacataattttttacatttatagttaagtaattatttctctttttcatcatctcatttatacaaggtaatacacttttagaaattttttctttatttattggctttagtatatatctgtatgcttttacctcataaccttcttgcataaactctacaaatgaagtaacaaatattatttctaacttatgatcaaactctcttatcttcctagcagtatccataccatttattgttttcatttgtatgtccataattaatatgtctaaatctttaggatagttatttagtaactcttctcctgatgaaaattcatatatgttataatttataggatatgaacttaatatttcacttaatatatcttttatttttattcgataatgtagttcatcatcacatattcctatactaatcacaattcttaaacatcctttcttatatatttttaataaatatataaaatttctattcattttacatattttaacatacttctgtagcaaatagctatttagattttaattttagctttttggacattaagtattactttttggatttacaatctattttaattttcattataatacaattttttaatatatattgaatatatttagcgattttaataacatattcttcgagaagtttttagtatctagtttttgttaaacaaaaagtatgcaccttcctttttatagtaatattttaattatcgctataattttgaagaatacacactatattttaaatattcatataaaacatattaaaaaatagtggctttaaattttttaaagccactatttttttaaatgatgttcctgaaaatatattaagttagttattctaatcaatttgaagacttttgcttctccttgcctatatctaacataatttcataatttaatttacctttctttaaatcaactcctgagttacttctaataatcccacaatccaacatttcgtcaaataccttcctagataaacctagtttctcacgtaataatgttgatacctttaactgacatggatatttactaataatatgaacttgtgtaaggtcattaatattaatttcttgtcctactattttatactctggaataccaacttctgctccatttctatgtaaaagttccgtattcatagcatattgcttagcaagattataatcgtttgtatggaattgttctagtgtttctggatttaagctttttggattgacacgagaatatatagttgagttccatgttgaatcacaatttgaacacttgtatattaaccatatatccaaatatttatgttgagcattaaccctaaataaacctgaacaaatatattcagtcttttttccacatttcttacaatacctaattacaggtaactgggagatatattccacctcccaagtaatttttttcataaatgcaacttcctttctataagattactaaattaatagaaagttatgaaaaggtggaatataatcaagtatttttttcaaaacaagacctcctaattttaataaattttaatttcaaacatataaaaagctactacttcttattagatactttacaactctattcgttatctgctgtacaagttattgaaattatttaaattatagcatccacttataagaaactatacctcaaacacttttatcaaaagaaaatgagccagtataattataaaactatactggctcattcttaactatcttttcttttttcttgtaatacaattctttgaatacttttcaaagacaagtaatatttttctgataaatatttcaaatcatatccaacttgataatcttcataaatttgcatatttctaattgataaatcttcacgagtagacgtactacttccccattcttttttattattagactttctaggaatatagatatattctccatctacatattcctgtatcaattcaagtaattcttctggtaatatatgtattgcttttttatagctcattctgcactcctattaaataataattttttattaggaatagcaaagggctatttatatattaaattttatatttgcaatagcccttgctatgcaaaaataaagattaaatcaaacataaatctcacccctccttatatattgcaacgatacatataagtctatcagcagtataaatagttgtcaattaacataacttcttcatctaacctttatattatctttatttattttcataattcatctattttagagactaacttttttcttcttattagatatatttaaagttattaatcaacataagtcctttatcttgagggatttattaccgaacaaggaaccccaactatacactttccacaaatatcacaaccacctatataagtgtattttttttcatttatcatacacatttcataacacttattcctattaaatccatcttcttttaaagcttctttcacgcatttgttgacacattttttgcaactattattatgtttatacaagcagtattcattttctggtcttttagttggctctaattctaaacttgtgattatgcttcctattcttccacaacaccctttttctgtaataagcatattatttaaaccaaatgttccaagacctgctatgaatgctacatgtctttgtgaccagtcacttaccaatttttcactgtcaaaattatacgacccaggaatagcatatgaattagcccccatcttctctagttcttcacataagaaatcatttaaatttgaaatcaacatattagtttctatgtacgctcttgcccatatttcagaacattcaaaccctccaatattactattatttacactttcatcaaaaggtataaaatatgtaattatagtttttccattttccagaaaatcttttggcatagcatgagatgttcctacaacactttttagcttctgaaacatatcatcttcagcagatgcataagcaaacaaaagttcttgccactttgtagttatattatttgatttatgataattttttacaaagttgttcattgatgtttcaatcttatttttcatagtatcacccctagataattctatatttccaatttaatgttattattttatattatataatagtattttataatatgcgcactaattaatattaaaactatgttcatcaatcattcttaaaaaagctcctaatatcaatacgatattagaagccttttcttatctaatctaatttattgcaattcctgcacttgcatatcctgctacagtattaactaatgaaagacctgaagctgttgcagtaaatactagtaagaatcgagtttctgctgttgctgctatatttaatcctgttacaattccactagaaattgaaccaactgataatatacctgtaagtggtggagctagtgtaactgtcgctcctggtacagctgtaaatgagttatttggtgcagtagattggtaaagtgttgctgtaattgtaattgttgaaccaacaagtgaaagtgctgctgttgtactgaagtatgctgaaatagatgttattgttccatctcttggcattgaaaatgcaaagttagtcaatgtccctgctgcgtttgtaaggtctattactccaccaactatacttaatcctggagctgaactaccaaagccaacaaaacctggtgtacctactaatcctccagctatagttgtaagtgatagtggtatacctgatgcaaaaggtattattgcactagcacctgttgggcctgttggacctgttgcccctgttgctcccgttgctccggttggacctactaatccatctgcccctgttggacctgttgctccggttgcccctgttgctccatctgctcctgttggacctgttgctcctattgggcctgttgctccggttgctcctgctaatcctgttgctccggttgctcctgttggacctactaatccgtctgctcctgttggacctgttgcccctgttggacctgttgctccatctgctcctgtatttcctgttgcccctgttgctccggttggacctgctactccatctgctcctgttgctcccgtcgctccggttggacctactaatccatctgctcctgttggacctgtcgctcctgttgctccggttgctccagttattcctactccggttgcccctgttggacctgttgggcctactaatccatctgctcctgttgcccctgttgctcctgttggacctactaatccatctgctcctgttggacctgttgctccggttgcccctgtcgctcctgttgctccatctgctccggttactcctgttgccccggttggtcctattagtcctgctgctcctgttgcccctgttactcctgttgggcctgttgctccggttgctccggttgctccggttggacctattaaccctgttgctcctgttattcctattcctgttgctcctgttgcccctgttgggcctgttattcctattcctgttgctcctgttgctcctgttgggcctgttactccatctgctcctgttgcccctgttgggcctgttgggcctgttactcctgttgctccatctgcccctgttgctcctgttgctcctgttggacctgttattcctattcctgttgctcctattgcccctgttggacctgttgctccaggtgttcctgtcgctcctgttggacctattaatcctgttgctcctgttactcctactcctgttgctcctgttgggcctgttggacctgttactccaaatcctgttgcccctgttgctcctgttggacctgttattccatctgctcctgttgctcccgttggacctgttggacctgttactccatctgctcctgttgctcctgtcgctcctgttgggcctgttgggcctgttgggcctgttactccaaaccctatagctcctgtcgctcctgttgggcctgttccccctgttgctcctgttggacctcttaatcctgttgctcctgtattccctgtatttcctgttgggccagtcggaccggttggtcctgttgggcctgttccccctactcctggacctgttggacccgttggtcctgttgggccggttctacctcttggacccattgggcctgttggacctacacatgatggtggacagcaatgatggcaatcacagctattataatcatcacgaccattattacaatcatcatatttatcatagccattgttgtaatcattatcatcaaatggtccaaaatatttatttctactcattattaaaagcacctcctgatatatttgagcttttaagctctatatataatatgtcaaatttagtatgattgtgacctatcaactatttttaaatttactaaaataattttcattgtgcaaaacagcactatcgttaggtttgatttcttttgttttttcatgataataaatagctttatctgattctcctaacctgtcataacagacacttaattgtatagatggtatatatccataacaatcatttgacttaaaacctccattagtatcattcttatctcttgttaatgctaccttataccaaaaaatggcttctttatatttttgtctatcaaacatatgctttcctatgtcacaacaaatttctgctcttggctcatcaaattcgaaacttctaaacaatgaatataaggcacttttttcatcattaattaagtaataacatgtggctaaatctctgcaggcactgatacaatcctcaatccatcctcttgatgagtctaaaaacttagtaaaaccttctattgcttctttatacctagcattatagtacaactctctagagtaatagaattggtgtcttggctccaatgtttttccttctgaaatcattttttcaaaaattctaagatttcttagagggtcctgtctatgaagctttttatgagatattgcaatgtcagaataaaatacctctccaaaaagaggtactacttcatgaatagggtcaacccatttatgattagaacttcttttaaacaatcgttctctataatatgagagagttgggttaccattttcatcaaaggatacattgtattttgccataacaatatcaatggaagtatccaagctttctttaatctttaataatttttctctatcagcttctaaaattatgtcatctgcatcaagccacatagtatagtctttagaagctttagaaaatgaaaaatttcttgcagcagagaaatcatctatccattcgaaatcgtacaccatgtctgtatattttgagactatttcttttgtggaatctgtagaaccggtatctacaattataatttcgtctactatatcctttacacattctaagcatctgcctataacttcttcctcattcttaacaatcatgcacaaacttattgcaatcataatgtacaactcctttgtcttctatatattgcagacataagtaatatatggtattttctcttgttttgttattaaatttataaaaacttttgacgacagaaagttactaaagaaccttatcttttatgtattttttatagtagaatttattaaacttgaaatttggtaataattgttgaaatgataaaaccatatttaatttcatacaaaaaagagtgtcccataaactaaaaagttcattttgagacactcttatttaatattatatatatatttgtaaaacagacattttaatatgatactttgatactttattcattcctattcattcctattcattatataatcaatcagcccgtactctttagcctctagtgcagtcataaaattatctctatctgtatctcttctaatatcttctattgatttacctgtattttcagaaagaattttatctaatcgttcttttattttcaatatattatctacagctatttttacatctgttgcttgacctttagctcctcccattggctgatgaatcataatctctgaattgggtaaagcacatctttttccatgtgttcctcctgcaagtaaaaaagcactcatacttgcagccataccaatacagatagtcgatacatcacatctgacataattcatagtatcatatatagcaaatcctgatgtagcagagccaccagggctatttatatatataattatatctgaatctgggtcttctgattctaaaaacagtaattgagctactactaaacttgcaatagcatcattaatttcttctcctataaatataattctatcttttaataattttgaatatatatcataagacctttccccttgacctgtttgttcaattacatgtggcactaaactcatgctactttcacctcacaattaatattaaagttaagataagaattgatttcatctcttctttgtttataattcatatttgcataagaaatacatttttcgctttgaatttgatgatttagatttaaaacaaatctctgttgaataggataaaattcatctttatttctatatacttgtggagattctttatataaatttctaaatgctagtgtaaaagattgatgtgtagaatatcctactgtaatagctatatctataatatatttgtctgtaaatataagttgtctagctgcttcagtaagtctcctcctctgtatgtattgatggatagtacatcctacaacatttgtaaacattctgtgtaaatggtattttgaataattagcaatataagctattttatctaaatttagattttctgtaagattttcttctatataatcaattatctccataataacatctgtatttgttttcaactctatcctctccttttaagtattataacctatgcaaaaagttttttcttaatataaattgctatcttaatttagtgtatagcaataaagtatcgataaaacaatatcaagtatttttatacaaaaatattaatatatatttcttttaaagtttaaacttaattacatctattatatgtagattgctacatgttttatctatgtaccttgattcatatgtattattttgctgagtatttttacacctttttcaatttcatcaaaactaagatgagcataacctagtataatttcatggtcatattctaatatattctcaattgcatattgttgtataggataaacttttatacctgcttcaaaaattttatgaattaaactttccgtaaatttaacattatagaaatgagcaactatatgaagccctgctgcttcaccttttattttaaattcatttttaaattccgtgtttaaaacttttatgagatatttacgttttctattgtacaacttcttcattctaaatatgtacttctctaaacctccatttccaataaattcagctaatacatattgcaatattgtttctgtatgaacatcagagtacatttttaaggttttatagctttctaaaatattgtctggtaataacataaatccaacacgaatagctggagataatattttactaaaagaacctatgtaaattactttatttgggctaagttcataaagagaactaattggttgaccctcatatctaaattcactatcataatcatcttcaattatatagtaatcattctctgttgcacatttaataagctctagtcttctttgaataggtaaaatccctcctaatggatattgatgagaaggtgtagtataaacaaaagaaatcccctttattgattttattaagttggtattcattcccttatcatctactttaattccaacaactgaatatccaatagatgaaataacctttaataagcctttatgaatagggtcttctacagcaacctttttattacttttgtataaaagctgtgaaattaaagataaaccttgtgttgaaccagaaacaatcataatgtttttggaattacatctaattcctctagtacgaaataaatacttagatatttccactcttaaaacccatacaccagctgtacttccatatctgaaatccgaatctgataaatcatacagtatttgtttatatagctttgaaagttctttgcgtggaaatagttttaattctggaactcctgaacgaaaatctatataatttttttgtttattagtatgtaaatctttttcatctctaaaagtatcatttaacttaaaatcaactttatgccctgatattcctttagctacaattgttccatatccattccttgtttccaaatatccttctgcaattaattgattatatgcatctaaaactgtattacgagatacagatagttcttttgataaagtcctagatgatggcagtttttgctcaaactttaagcttccatccagaatcatatcttttatctcacaataaatttgtcttgataatgatatattactatttctattaatcgtaatccacattctaatacctccaaaagtggttctataaaattactataaaaatggaactacaaaatccacttttaacttgctaagattatatcataaaatataaaataaaaaggagtctatattatgttagaaatatcacataaagttaaagaaatttatcccaatattaaatttggagttatggttataaatattacacattcaaaacctaataaagaaaattttttagttcttaaaaactctacaattaaaaatattatagaacaacacccagaatacaatcgtaaagaaaaaattaaaacagagcctgtttcaagttatataaagtattataaaaaattcaagaaaacttaccctgtattgcttcaattagaatctattctattaaaatcaaaaggtatcccagatgtaggtgtaacaattgagtcaatgtttttagcagaattgaaaaatcttcttctaacagcaggtcatgaccttgataaaatggaattacctttgaaaatagaattagcaaatggaagtgaacatttttatggtataggtggtaaagagcatattttaacaaaagatgatttatttttatcagataatattggtatattatctagtattcttaatggccctgataatcgaacagctataacaaaagatactaaaaatattatgtattttgtatatggacctgataaaatatcagaaaagcaaattcaagaccatttaaatgacataaaacactatatttcaagtgcttttccagatttaaaagttaattcaattgatatattttagttaatatattaaaatcctcataaatattttgaataaataaattagtgaagtatacattctagttaaactagatatacttcactaaaattaattatatgtagatattatttattttgaattttgtttataataaacactttattacatttatcctatgaataacttaattttataattaaagagtttcataagaaacaatttcacttaaaggaacacgagttttttcatgtctctctgggctctctggtatcttagattcatatcccatcaataatatatttattggttctagattatctggcaaactaaactcttctctaattatatctggattaaaatagcacacccaaacacttgccaatccaagttcagttgcctgtaacatcatatggtctgtaactatacttgtgtcaatatctgtaagttgtctcccatcaaaaggtcttgtccaaactttgtctttatctccacatacaagaattgctaatggagcatcatatatattggcagccttagaaagtttatttataccttctttttcctgaataacaatcaatctttgaggttgacgattaccaccagttggagctattcttgcaacatctaaaaccttctcaagtttttctttttcaacctttctatcttgataattacggcaagaatatcttttttttgtaagttcaacgaaattcatttatttaccccctattgttttattaggctaagttgatgatttatttaacctatgctataattttatcactatggtactatattacaataatgcacttttttgtaatatagtatctaaaaagatactttaaaataaataaaggagctcaaaaatgaaaaaatgtttagataattacagttgcccaatagaagcaacacttgcattgattggtggtaaatataagacacttatactttggcatcttaaagacactatattgaggtttaatgaattaaaaaaattaattcctaaagcaacgcctaagatgttaactcaacaattacgtgaattagaatcagatggtttaattataagagtggtttatcctgttgttcctccaaaagtagaatactcgctatctgattttggaaagagtattattccaattttagattccatgtgtgactggggttctgattacttagaaagtctatagagcattacagtttaaatcccattgctaatttaacttcatccatttgttctctagatgtcaacatttctaaaagcttaaaagctacatgtggagctgtttctggacaatatgaggttataatatttttatctacaacaattggttcattaactacatttacatcaaactcacttaactgtctttgtcttttaccatttttcaaatgatatgtagtagctttacgattttttaaaacaccactttttccaactggcaatgctgccacacaaatagaagcgattattttttcttttgaattaaactcccttattagatttaaaaaagatgaatcatatgcttcatcataaaatccaaattcttcaaatcctccaggaatagctagggcatcataatcatcaacacatacttcttctatcgtcttatcaactaatacttgtatattaaatgtactcataacttgttttttaaatccacaagtcactacatcaatatcatgcccataatcgttacgagcccatcccataacatctacaaatacactaaattccatagtttcaaaaccttttgctaaaaaaactaaaactttcatattctattttcctcctaaaatataattaacactttactagtaaattatttaaaaaatatcttttattgtattaaattcttctttaattgtagataaaacaatggttgtattagctttttgaatccccccaatttccttcaaagtcactgatataaactcttcaagattacttgtatcttctgctaatacttttattaagtaatcatactctcctgaaatatgatgacattctaatacagtatcatattccaatatagttttcttaaattctttcatacttttagataaatcagtattgataaatataaaagccaaaagcttatattttgttttttcccgattaatttgaatagtgtacttttgaattaaatttgactgctcaattttccttatacgctctgagactgctggtactgataaattaatttgtctgcttatttcagaggttgaagccctactattcttttttagagaattaattatttttaaatctatttcatccagagctactcacctccttaattatttaatacaattttagctaataatttacattaagtaaataaatttaatcatttcaataaaatttaatacaaatatgttatttttccttaaaattttagttttctttaatcaaaacacatataatacttaaaattatttaagttgaattaatgtttttattttgtataatatattagaaccttaatatatcattgaaaattcaacaatactagacatatacttctacatgttgtaatatttatgaaaatagtatccctatatcaaaagtataaaactcataatcttaattttcccatagactataaaattttattggtagcgagtcttcaaataactttgtaatgatagatttactaaattaatataatatatagcaaatataactttcttattgactataaccaagtattatgataacataacttaagctataattaataaaacatattttaaataaataagataatccacaaagtacaaaagtacaatttaaatatagataaactagaattaatactaaaattaggatgtgaataattatgatttatatagaattagttaaacttgttagaaaacttaactctacacaaatgtatacgatgaagcgttgtgtagaggttaatctgaaagcttaaagctttctatcttcatcggcaaatataggtttagtatagttttttggctatgcttatttaaaattacctatttgccgatagatagtatagattttctggtcatagacaacaatgcttgtctatgaccttttgtttttccaaaagcagaggtcggcattttacaatgccattcctctgctttttttatttccataaattttttaataaaagaaaaggagtttgaattatgagtttattaaaagtaactaatttatcacaatgttttatggataaatcactgtatgagaaagctaactttgatttattcaaaggtgaacatataggtgtagttggccaaaatggtacaggtaaaagtacattaattaaaattttattgggagaagttgttccagattcaggagaaatcaagtggcaacctaatatcaatataggccatttagaccaatatgcagaaatcaatagagatacaacaatatcactctatttacacactgcatttgaagaactttataaaatagaaaaggaaatgaatttactctatcaaaaaagtgctatatctgaaaatgagcaatatctaatcaaagcatcagattatcaggaacaactaatagcaagtaatttctattctatagataatgaaataaataaaatagcaaatggtcttggattagattcaataggaatgaatcgtgttgttgaagagcttagtggtgggcaaagggcaaaggtaattttagcaaaattgctactttctaaccatgatgttctattattagatgaaccaacaaactttttagataaagaacatgttgaatggctctcaaattatttaaatacatttaatggggcatttattgtagtttcccacgattttgattttttagaaaaaatttctacaggtattcttgatatagaatttggtatgattaaaaaatatcatggaaaatattcagagttccttaaacaaaaatcacatttaagagaagattatattagaaggtatcaagcacaacaaaagaaaatagaaaaagaagagacatttatacgtaaaaataaagctggagtaaattcaaaaattgcaagaggaagacaaaaacaattggataaaatagaaagaatagctcctcctagttttacaggaaaaccaaatattcaattttcagaaattgaaatatcggctcaaaatgctcttactataacaaatcttgaagttggatactactattctttacttccaaaattaaatttttctgttgatggaggtcaaaaaatagttataactggttttaatggaatcggtaaatctaccttgttaaagacattagtcaaagatattcctcgtatatctggagatttccagttttcagaacaagttaaaattggttattatgagcaagatttaaaatgggaaaatcctgataaaaccccacttcaaatagtagcagataaatatccaaaattaaatacaaaagagattagacgtcatctagccagatgtggtgtgaaggaagagcatgtttcaaggagtgtatctactttaagtggtggtgaacaatctaaggttaaattatgttgtatgatgttatctccttgtaattttcttattctggatgaaccaaccaatcactttgatgcagagacaaaggatgctttacaaaatgctttgaaacagtttagaggaagtataatcctagtttcccatgaagaaaaattttataaaggttggattgataaagtgtttaatatagaaaaacaattagtataagtttatacacaatatacaatattatttaattgatatttcaatgcaaattttaatgttctagttaatgtttcactgcaaataaactaaaaaaattttattagaacataaagtacattaccaggatataaacttaatgaggctatctcaaaatagagatagacctcttcttcattgttgagataacgaaaatacatttgacttcacacataaaagaatgcctcattaactaaaaattcaacttgagacatcttcattaatattaaaatctattctaatcgattctattcacaagtttatatcctagtcctttaaccgttataagtattttaggatttgaggggttatcttcaattttttctcttatatgtcgtatatgcaccataattgtattgtcacaaatactactatatactccccatacttgttcatagagtctttcttttcctataattttatttacattttgagccatgtagcttaaaagatgatactcccttccagttaactcaatctcatttctatctttatatacacggtttccttctatatcaatagtaatatctcctattttaataactgcactatctgatggtacaatgctttgatactgttgtctacgtaattgcgctttaactcgaaaagcaatttctcttggactgaatggctttgttatatagtcatctcccccactactaagacctagtattttgtcaatatcatcattttttgatgataaaaaaagaatagaacagtatgaaaactctcgaatttttttacacacttctataccatctatatctggtaacattatatcaagaatgacaacatctggacatgctatcttacacagcgaaatagcatctaaaccattataagctttaataatgtttttaaaaccatcatttatgagtacttcttcaattaaatctactatatctttttcatcatcaacaagtaatatttttttattaaaatatgtatccatattgaaatctctccataaaaatttattatattctaatcttgcagtatcaatatcttgtttttttatattcactactcttgcttttacattactaatagtaacatctctaatagacaaattcaatcactatgaaaattaagataagtttctttaaaataaagtgtatgatacattaaaacctatagaaaattaatttcatccaaagtttataatattagactaatacacttacagatacagatacagattaatacaatagtaaaataaaaggagttgtcttaaaattgactttttctaatcaaactttaagttcaactcccttttaaacttttatatgttatttttattaattctttatatcaattataactttaattttcaatagtatatatctaccactaattgaattacttattaaaacataaaatatctacctaaactatttatttaatatctacatatatttatatctattcttatacttacatatacaaaaaatggttaaaaataaagttaaaatctcagcacttggtactgctaaccatatcccatttatatttaatatatttggcagtatcaataaacctatagttataaatccaaatgtacgtagaaaagataatattgcagagaccttgccatttgacaatgctgtaaacatagacgaagtaaaaatattatacccacaaaaaataaaactaaaagaaaatatataaaatccagaccttgcaatttcataaactcggcttcctctttgagaaaaaatctctacaatgattggtgaacatgatatagaaaagataaataccaataaagatgccactgaaataaataatatacaaatcttaaaaacatgatttaactgtgtattattttcacttccatagttataacttattattggtgcaacacccattgagaaacctatataaagcgaagttaaaagaaattgagaataaataattattgtaatagctgcaactccatcctcaccaattaatttcatcatcatagcattaaataaaaaagtagtaactgctgttgatagttgacctaccatttcagatgaaccattaaaacaagcttcaaataatattcttttatctagtctgggtatacaaaacttaagtaactctttattttttgaaaagaaaaccatacctgaaacggtaggaattaggtatcctactccagttgcaagtgctgctccactaatacccatttgtaacagaacaatgaacacatagtcaagaattatattagcacacccagcacctaacactagccataatccaaattgaggctttccagctgttacaaataaacattgaaataatacttgtagtatatttgcagaagcaaaaaccaagataataaaaagatatgaacgacaatatttaattaaaacttcacttgctcctaaccatataatgatataatccataaatacaatacctataccagtaattattaccccaattacaactcctgataatacgattaaagaaaaagctttatttgctccctcaatatcaccatttcccatcttacgtgctacaatagcacttcctccagtggcaagcatagttccaattccaactataagattaataattggacatacaatattaattgctgatagagcatttgtattaataaatcttgatacaaatatagtatctacgattgtatacaaccccataaaaatcatcataaaaatagtaggaaatgcaaacttcaatagagtaaataaattaaatctttgtgccagtaaattatcttgctcataaagattatcttgttcatgattttctgaataatatacatcactcattttgtttatttttctgtacattaattatttttaaaatatattccaaacaattagacatttacagacctcctttctgcataagaattatatctaattatttggatatagttttaattaatcttgcttttttacacaattatatttctactaaagaaacttttaaatccttactttaatcattttatagctttcagtgcctttagcgcaaatacttgttcacatagtttagtgtcatatgaaacgtatttatatatagttatacattgtctatttttactaatttattaactacttgcacttttataatgtctcatacctaacttccaaaatctccacataaacaatgtaaacaaaaatacaattaaaattgagtatattaatccattaattgttattgtcccagccaaaatttgagtcggaattgtcgacataattccatatggtaagattaaatagaataatactttaaaaacaccttcatatattacaccaggaattttcatattcattggcaataaattatcttctaatctcattatcgcagaagatgatataacaaaaaatgaaactgttctaagtatgatacatacatcataaaaaagtaatgtcatcaataacaccatgaaaatatatattattatcataactaaagttatctctgagtttaacttagatattccatataaaacaataagtatacttgctagaattaatggtgatgaaccaatattaatattttcaaatgttaacctaaatagtgggtctaatggttttgtaatatagtagtctaattctccttcttggatttttcgtggaatatcataaataccaaaaaagaaaatcgtcatatttatcgcatttattaatgagaaagttcctataaatattaacatctctccttgttgccatccccctattgagtctacatgagaatatatactattaaacattagaagttgtaatataaataatgaactatctacaaaaaatgctccaaaaaaatcaaatctaaataccatcatctttgataatttcatttttaataacataaatattattttcaaattttttttcatcatatacccaccccatcaaataatgttctcattcttttatacataactttatttactacagaaaaaaataaaacccataatgctagaataattaatccttgtattgcctcattgctgtttctacctattagtaacatagatggcaaatatgttgtataataaaatggaaataccttcataactgttactatagtttctggtaagagtacaagtggtatcattgttcctgtaataaattcaacaatattttcaattatcattctaaaaaaactaatctcaagaaatttaaatgacaaaatcccaataaagaagtggagtttcatcataaaaataaaccctagaaaaatcatcaaaattgaaattaatatttgaactggatttgatgtaaaggcaaaatctattttaaatataaaaatccatacaaatgcagaaatcatattaaatacaaaataaaaacatgtcattccaaaatttttagcaataaaataattttgaacattaattggaataatcatgtactttgaaaatgtgcccaattttacacgattacatatctcttcactggtactctttgacatatcaatacctgctaaaaatgagcttattatatagtaagacaacatagagttaaatgtaaaaccagagactattttattttcaccaaaaattgctttccataaaatataagcaaataaaatttttacaatcgtaaacaccatattaaccaccacatcaaatctccagataagttgcactttaaagttaattttggctacttcataataccttctaatactttgtttaaatttataaaacattgaataatttgaacttgcttcattatagttgctcataatactcatcacttcctttcttatatattctctctacaatactacctatatcttcttcttcaatcattacatctttaacatcatatttatcaaaaatccatttaatcgtttcatttcctctttcttttagcacaattactgatgtcttatgatttgtttgttcaacaactttacaatcttttggaaatacaatgttagtttcattggaaaaactaactgttatttttttatatttttgaaaatgattaaatagtttctctgtagaaccatcatatattttacggctattttctacaacaatacttctactacagagactcttaatatcttccatgtaatgagaagtaagtataatagtagttccttttgtttcatttacttcttttaggaaatacctaatttgtttttgggctatagcatctaagcctatagttggttcatccaaaaataatatttttggattatgtagaagggctactattaattccattttcattctttctcctaaagaaagcgtcctaacttgaacatttaaatagtcagatacctcaaataattcgataaagtaatccaagttttttttatattcttcattagatatatcatataattctttaaataaaagaaacgtatctgctggtgtcaattcaaagaatagttgacttttttggcccataacaacagcatattgttttttaaaattattttctaatttgttagggtaataacccataacagatatttctccagaagacggtgcaataataccagttaacatcttaataagagtagttttgccagctccattttgacctattaatccaacaaattctccttcttctatctttaaatcaaatgacgatatagctgttttttctgtatatttcctattaaataaagactttacactccccataaatcctgcctttttctcaaatcttctataagatttagtcagttcattaagttcaattatactcattttaactacctccatatttcataatttatataaaaaaagtccacaggtatatatctgcctttttctgtgcttatatttaacagcacaaaaacagaaaactcctgtggactagaaaaattaatgctctctatttcaaaatagttatcaaaataatactatacaaaattaataaaagtgtagcagattaaagcctactacaccataatttaacaaagtaatatatattttaaatactatttgttgtcatatgtcagttatctataaaggcagaataagacacaaaaattaaatgtattaaaaatacacttaaaatttctgattatacagaatatatgtgtctccaactatttaattgttggttaccattatataactccgacatcaaggcactcctctcataatattattattgatatcatatcataaaggttatttatgttcaagtatggatttatatactaatacatttagcttatttcttcagggttgaatttaaatttcatttataatattcgtttataaattaaaaatataatacgtatattaaaactggttattttactgtaatatttttattgtaaaagatatacttttacctatacaggatgtaatttctttagttctatattataataatattgtaataagagttcaacttataatacagtaaaatataaactgtaaatcttaagggggtaatctatggaaaataatacaatacaaaaacaattaagagatttatcaaaaaaaatttggcatatttatattttaaatccagaagaagaaaaccttaaatttattatttccttattagataacaaccttgcattaattggaacaggaaaacatgaattttacgaaacattagaagaatttattataggtcttgaaaaagaccaaacagaatcagagcaaatagactttgagattatagatgagtggtattcatgtaccaaagttacagacgaagcttttatagtatatggtactctttgggtaatagaaaaagattacctagaaaaagatatctatgtagaaatggatactcgatttactatggtatacagagttacagatgatatgattaaacttatccatgttcaccattctattccaaactttgaccaaatgaaagatgagtattaccctaaaacaataactgaaaaagcacaagaagcactagcaatggcaaatgaatttaaactaaaatcagaaaaagaccttatgactggactatacaatagacatttttttgaagtacacataaaagaaatgcttaaaactgtttcatatggatacttttacatctttgatttagataattttaaacaggtaaatgatatctttggtcatgttcgaggagatgaaatactaatacagttttcaaatattttgactaaagtattcgtaaatgatgctattattggaagacttggtggagatgaatttgctgtttttgaatatagtaatcaatcaaaagagaatgttgaaaataaagcaaagaaagttttagaattatgtctagagagtaattcttgttctataggtatatctaaattagaaaataaatctgatactttccagtctttatacaaacaatcggattatgctttgtattattcaaaacgaaataataaaggaaactttagttggttttagtacaaaagatattaaaataggcaaatttattagagtatcttgtcctatatactaataagtaaagtaaacaacaagctatctttgcatatatttatataaaccaactattcttaataaaactacaatagtcaacatgaccactattatagaatataataaactaaaaacattattaacatgattaatattatattttaataattttatttttaaaagtaagtccaaaatgttatattttttgattaaaactgatgttgatataaaaaattttacttaaaaaaacacttagaaaggctttataaagagccttttttgcttttattgattaaattttcatataaaattccttattaaatttcaaatcaataaaaaaaggctctttataaagcctcccctatttttattgattaaatcctaatatagacaatgccttagcatcatagtaagtagtcatctctcttgttgcatcctttaatttacggtaatcaaagtctaatgctccaccaaaagctgatatttcagacccatcagacctataccatttcccatcaatttgtatatagttccaagcatgatttaatgatggatttaatatagatagtgaatccattcccattaaccttgttaataaatgaaagctacttgcaaaacttccacatacaccacgtttatcaaccagattaccatagactatgttacaatatttagagtctacatattttgcttcggttaccaattttgcagctctattagctctttccatctcagatgcatttctccagtcaaaactatttaaaaaattcctgattactgtaagtgtatcttgagcttgtttgtaagaaatccaatctccatcggctattacttctatagggtcaagttttccaaagcctattctctgatatgagctacctgacaatgctgctgcataaaatcctagcccttccatacccttatttatataataatatttaccatctgctcgaagctcaactccatttggatttcctccatagagtaaattaaacttatttttttaaaacatattgtttaaatcagtacatttatatgttttttttgttcatctgttttatcaaatatattagtctttgaattttgtttgtattcttcagcatctttatctaacttttctattctcgactcaagtttcattatttcttcttgtgttaaatttataaaatttttaagcatattttcaagctcttcacgagttttacctactaaagataagtcctcagatactttctcttttttattagaatcctctttataatcctttttttgttctaactcttctaatttttcatcatttaatatttcttcttcaattttttcattagactctttagtgattaaagattctttttcatcatttgtatttagataagttgaattttcatctaacattgtacttttatttttatcttctataatgctatttttaatacctatttctatattagaaaagttattagttgtttctcttatttctgatttatataagttcttaattgcttcatttatttttttagtataaacctcttgtctatattttaaatctctaattctatcattaagttcttgcttttgtttcataatattagataaataagtgtcttttcctacagtttcatttttcttaaccatactttcatttattcttgtattatttatattactttcatgtctaaatgaatattgacttctatattgactagatattttcatttatttcacctctctaaaataaatttatgtttataaaaaccaacttaacttaattatattttatcatcaaaagtatacatttacaaatattagttaatagttttataggttcgagcattgttttcaacaaaaaatttttattataaattaaaacaataatttttataaatatcttatttgtattttataattcatatatttttactttataaattagcaatattgcagttttgctcttaagaaacatctctatcatacataagcatatactctattatgtattagtataaatatgccttttcttatcttacataagacctctttataaaggagactatcgtaacaaatatgtatacattatcacatatatatatcatcatataaaaaatcaaactttattaaaaaaattaataaattgctttaaataataccacaaaccaaatttgccatcaaaatcacattaaagtaacaaattaatggcaaatttaatacattaatagtatatagactcatagaatgaacaaaaaaactacacttatcttctaatcgtcttatttatttttgagatatttttaaatttcttttctttttttgctaagtattcgcttttattgtctgcaaatactgcttcagttttaagcctacgataggattcccatcttttaggcgaaagttcttgatgagcaatagcttcccagatagcacagcctggttctgaggtgtgagtacaattacgaaaatgacattttccgaaataagcttctatatctgcaaaacttttatctaaaccttctgaaacatcccacattcccaactctctcatacctggtgtgtcaataacaataccaccacctgaaattaaaaatagctctcgtctagtcgtggcatgtcttcctttatcatcatctatgcgaatttcctttgtatttaaaaattctcctcctagcagacaattaattaatgaagattttccaactcctgaagagccaagtaatgcaacagtacagcctgatttgatatacttagaaatctgtttataaccatctggctctatagatgaggtaactactacatctacacccaaggctatagaattaactacttgtaatttacgatgcacattgtcacataagtctgatttagtaagtactactactgggatagctccactttcccatgttaaagacagatacctctccaatctatgaatgttaaaatccttattcagtgacatgcacaaaaaaacaatgtcaatattagctgcaaccacctgttcctcatttacctttccagcagccttacgcacaaacaagctttttctatgaagcacatgatgaataatagcattaccatttttattattgcaacgatccaacataacgaaatcaccaactgtgggaaaatcagattgtatagtagcctcaaaacgcagttttcctgaaacctctgcaaacagtacaccatttacacatacagcttgataaaagttcttttcctgcgagataattcgagcaaggtataaatcgtgatattccatactttgagtaataaaattcctatttagaccatagtcttgtaaattgatttgtttcataccattcattctgtttcctccttttccaacttttcaatgattctttctagtgggaaagggggctgtgccagtggttttaatgcaattgacattaatttcactgaattatcatcagctgcaatacgattagaactaagatgtccacagcgtgtacaacgatgaataattgcccactcaccattttttctcacccacactccaataggttccatattagcatcacaatctgcagcacggtcaccaggaatgatatctacatgaagactatgtaaacaatgtggacaatgatttctatgttgtgtaccagctccttcaggaactacaaggcaaccacaatttttgcaaataaagttatccatacaggaattttcctgataataagctcgttttctatttttataattcatttttatttcctccgtatcttgtattttctacaaaaaaagtccacaggtatttatatctgcctttttatgtggtatacatatttacctacacaaaaacagaaaacccctgtggactagaaaatttagtatcttctatttcaacataattatattcaaaataatactgtgtaaaattaataaaagtgtagcagattaaagcccactacaccacaatttaacaaagtaatatgtaatattattatttgttgtctaatgttagttatctataaaggcagagtaagacacaacaatcaaatgtatcaaaaatacacttaaaaattctgattaaacagaacccatatgcgtctccaactatttatttgttggttaccattatatataactctgacatcaggcaagacactccttcactaataattattattaaaattttatcataaaatataagtatgttcaagtataatttaatatattcatatatttatgtttgtctcattttcttattctataaaatctagtggtattttaaaatttaatgttcacctagtattaataataaaaattaattgctattatttgttttctcattttatgcctattgctcaatttatctcacttaaattaataacaactgtcttttcatacaaaacctacaatcaagtttttccatatattctacatgaatagtctattttttttatataaaataacgttcatatttgtaaatttatttaattttcaaataagtatattgaataataagcaattctattgtattattgtaattgtagaataaaactaaatcggcaaaactagagaaatttagtgacgcaaagctatagggactaacgcttataaaataaactatgagttatgtcagccagttgccaaaaagagatattctttttgtttttatgaaagttttttagggggataataatatatatgtttagagataaaatggatagatgtacacatatgttgactgcttatattggtagttcatatgattattgtgattttatagatacacaactagatgattttatactagagtacggagaaaatgtggtagaatcttgtttgcatcaagtgatggtattagtaagtaagtataattaaatagatttggttttctagagaaccctttttagttttatctactttaaatagccttatgttagaaagctaattaagatagatttctagtattcataattttattttctatttaaaatacatataataaagatgtaaatttgtatcaaataataaatatgagaacttaaattctcttatctatgtgaaaataaacatctcttaaaatgaaattctgtaaacataaatgattttttagtttgaaggattagattaacaaaattataaatttgcaaataagctatattaaaaaatataataattttttatataacttattcttttataacttttaattttaaaagaggagaatgtatataagagtattcaatgtactagaaaaaatcaaaagaaatattagaagaaatggatattgagtaatcaaataaaagattttgatattacaaatgatatgtttcaagaaagcattcctatcacaacaaaaactattcttgaagacatgccttcaaatgatgaattaaatcatgttttttcaaaaggttgtgaacgaaaaatgaaaaagagaaaaattgtattaatcacactactattaataggtgttttgttattaggaagtatcctatataatctttttttagtaaaagcagctaatatttcaatgctaaaggaatcttggaattttgatataccaatacctaacaaagaaattgaagtatttgatactcaagatagtattaatggagatggacaaagttattttattcaaggattttctgaaaagaatttcaaaaaagtttttaatttaaaaggtggtatagttgtaagcaaagataatattaatgaaatagaaaaatatattgataaatttaaaagagattctgttaacattaataaaagtaataaaaataaaattgaagaagattttaaaaaatataagttagaagttaaaaaagatgataagtatatatataagagaaattatgaaaactatgtagttttaattataaaaaaagatgaacaaaaattatacagtttaatatggaatcagtaggtacatatgtattattaagaattataaataataaaaataaattttagtcaatctacaaaaaccttttaaattgtctggaaatcacctcctcatttgttataaaaacatacaacaaatgaagaggtgattttatggtttttaaaaaaataattataagtggatatgtgctttcacatgtttatcaacatttgtaatgcctatatttgctaatgaattataatataaaaatattaaataatattcaactatagattatgtaaattatcctatgaaaaaaataagttgtataaaatctggcaactgtagattgacgatttcttttaaaattacaattataataagttttatagaattaaaaataaaactttagagatttttgataacattgtagactaaatttgccaccgaaattactttacagtggcaaatcggtggcaaatacaatatattattagtatataatctatataaacattactattgcttgattatcttagctacagtttccacatgtgtagaatgagggaacatatctacaggttgtgcctcaacacatttaaatccgtgaacatttagatagtctaaatcccttgctaaagtagaaggattacaagaaacatagacaattctttccggattcattgaaacaatagtctctaataccttttcgtcacatccctttctaggtgggtctacaactactacattggcagtcttaccctctctatacatcttaggtacaatttcctctgcctttccaacataaaattcagcattatgtatattgtttaatttagcatttatcttagcatcttttatggcatcatctataatttctattccataaacctttttagccttttgtgccaaaaataaagatattgtacctatcccacagtaaatatcaaaaacagtatcagtatcatttaaatttgcatattcaagagccttatcatacaatactttagtttggacagggtttacttggaaaaatgataatggtgaaatctcaaacactaagtcacctatataatcgtttatttttccatctccatatataactatattttctcttcctagaatagcattcgtatctttttgatttacatttacaaccaaagtcttaaatccaggtatattttccttaagcactgaagctaattctttaagatatggaagtttgtttccatttgctactaatacaaccattacttctttagttgtaaaacctatttttgttactaaatgcctaatcaaccccgtgtgagtcttttcatcatatatacttaccttataggcccttatatatgtttttattattttaacaattttatcatttatctcatgttgtattacgcatttttctgtcgatattacatcatgagtcttctttttatagaagccaataattggaataccattattcttttgtattggaaattgtgctttatttctatatctatatggattatccattcctatagtgtcatgaacttctacatcctctaacttacctattctcgaaagtacttgtttaacttcatttgttttcatttcaagttgtttattataatctaaatcttgtatctgacaccctccacaatccctaagattgtcactacacactcttttcaccctgaatggagacttttctattatctcaacaatatctccctcagcataatttttctttactttattaatcctaactttaactttatcatgtattaatccgccctctacaaaaactgtaataccattgtactttcctactcctactccgccttgaccaatgtctactatatctacaatatacatctcgtttttcgaaagcataaatcaccctccaatcaatctattatatttaaatctttacaaacttttttctttaaatttatattaaaatattgctattaattaaactatattttttactaagctacaatattttattttaccaaaaaaaaaggagcttataaagccccttagtaaataaatttattatttttcttataaaactctagttgaacctctatataccacgcctcttgatgcatccacagttacaacttctccatcttttactagatttgttatatcagttgcagacacaataactggtatatctaaatttatacctacaatagctgtatgtgatgtcattccaccattctcagttactacagctcctgctttttctatataattgttcatttcagcatcagtagcagtagaaacaagtatgtcgccttcattaaagtctacacaagcatttccattctttattatacgaactttaccttctaccgtttgagtacctacacctataccttgcacgatttcttcgcttattacatgaacctttattaaattagtagttccacttactcctactggtactccagcagttataactactaattccccattatctatataatcagcttgtctagctgcctcaattgccttttctataacttcatctgtatttcctgcaacagaagacttaactggatatactccccatgtaagagctaatttattcatagtcttttcattatttgtagtagctattattggagattttggtctaaatttagataccattctagcagtatatcctgaagaagtagatgttattatagctgatgcatttaaatctactgctgttgtacaagttgcatggcttattgcatctgttacagtaacattgttagtaccattttcctttagtaatctatcataatctaaagtctcttctgttctttttgctattgtagccatcatttttactgcctctacaggatattttccagcagcagtttctccagataacattatcgcatctgttccatcatatatagcattggcaacgtctgtaacttctgctcttgttggtcttggatttcttatcatagaatcaagcatttgagtggcagtaacaactggctttgctaattcattacatttttttatcatcattttttgaactattggcatctcttcagttggtatctcaacacctaagtcacctctagccaccattataccatcagaaacttttaatatttcatctaggttctctacaccttcttggttttctattttagatattatttgtatatcagttgcattattgttctctaatacttctcttattgctagtacatcagatgcctttcttacaaaagaagcagctatataatctattccttgacttattccaaactctatatcacttatatctttaggagttattgctggtaaatttatcttaacaccaggtacatttactcctttatgatttttaactattcctgaattttcaacaacacaaactatatcttctccatttatttcttttactcttaagccaactaaaccatcatctattagtatagaatctcctgatttaacgtcttcagcaagacctttatagcttactgtacacatttctttagtccccataatatctttcatagttatagtgaacttttgcccttcttctaaaaatacctctgggtcttcaaagttacctgttctaatttctggacctttagtatctaataatatagcaactggcttatttaatttttctctaactttctttgccatatcaattctttctttatgttcttcatgcgaaccgtgagaaaagttaaatctacacacatttagaccattttgcataagttgagttaaaatttcctcactttgtgatgctggacctagtgtacaaacaatttttgtcttctttacattatttaacatatttgctcctcctgagatattattccacagatttatttttaatactaaaacttatatagataatatttttgccatctcataagcttctttatcaaatactttcttttgagctaaagcttcacttatttctaaatcaattattttgttttcttttattcctacaactctagctgattttccatctaataataattctactgctcttactccaagtctacttgctagtattctatcagatacagttgggcttcctcctctttggacatgccccaatacagtgactcttaaatctgctcctgactcttttttaagttccttttctaaatcactagcacttccgactccttctgctaaaacgattatactatgtctcttacctcttttttgagtagtctttaatcttagagcaacttcatctactgtaatttctacttctggtactattatagtttccgctcctcctgcaagacctgcatataaagctaaatctccacagtgtcttcccataacttctactatgttaactctttcatgagatgatgatgtatctcttatcttacctatagcatctataatagtattcattgcagtatcaaatcctatagtataatctgtatatgctaaatcgttatctatagttcctggtatgcctatagctgggaatcctaagtcactaagtttttgggctcctgcaaatgaaccatctccaccaattacaactaagcaatcaattttatactttttaagaatttttactgcttttaatctaccttcttctgttttaaattcttcacatctggaagattttaatatagttcctcccctgtgtataatatctccaacagaagataagttcatttcagttaaatcttcttctagtaatcccttatatcctctattgattccatatactttgcatccataatatattgctgatcttacaaccgctctaatcgcagcattcattcctggagcatctcctccacttgttagtaatcctatagttttcattttttacctccttggattttatgtcaattttttattataatcattgttattgtattctaatggactttttttgtccctatatcactttttaatcccatcaagactaaaaaaattaaatgtccttaaatgtccattttgtgatattatatcacaaaacggacaatatttttcatattattataatatatttagatttttatataaaaaatcaagcttttacttttatgttatctttaggaagtaactcttctaagttatttataaattcatcacatatacaagtcaatgccccggtcattttatatgctttacgtttaccatttatattttcatccatagggtacaagtatatactgtcattacctggatattgtttggctatttctacaatattattagttgtatcagtatcagacatactatctattttcaaatacaattttttaccactttctggcttaatattttctacatttctagttcttcctgaattgtagtttctatctgcaaagtcagtatcatcatttatatcttttatctctctagctataagttttgcattttcgccttcttttatacttaatgttccttttacatatattatattatcttcattcaaaatgacattatacttttgtaataattgaggaaaaactattatttctatagcaccatacaaatcttctaattcaataaatgccataatttcatttcgttttgttgttttaatagttttagttacaatcattccacccattataacatctgtttcattcatttgtaggtatgactcttcttcctcttttaatgaatttaattttccattatccatagatgttttttcttgtagttctttttcaaattgtgataaaggatgtccacttacatacattcccaagacttctttttcaaggttaagtctctctctttcttcatactcttgccttttaggtaaactgtatatttgttgaaaatcactatcttcctcactatctccaaaagcatcaaataaagaaatttgaccttgaacatttttctttctatccatagatacactttctaataaactttcataaccagccatcagactagctctattttcacttatattatcaaaagctccacattttattagactttctattactctcttatttgtatctttttggtctaatcttttgactaaatctactaaatctacaaataatccattagattctctttcagcgattatattgtttattatatttacaccaacattttttacagctgctagaccaaatcttatattgtcgccttcaactgaaaactttgaaaaacttttgtttatatctggaggtaatacatctatttctagtgctttacattctcttatatactcaactaccttatcagtatttcccattacactggttatcaatgctgccataaattcaactggataatatgtttttagataagctgtctcatatgctaaaaccccatatgcagctgcatgtgatttattaaatgcatatctagcgaagtctatcatatcatcaaatattttattagctatttcctcttctacaccatttctgatacaccctgcaatttctatattaccatcttcatcaaatttaccatgaataaaatattgtctttcttcttccatcacgtccatctttttcttactcatggctcttctaactaggtcacttcgtccgtaactataaccacctaaatctctaacgacctgcataacctgctcttgatataccaaacaaccatatgtaacttccattataggctttaatttttcatgtagatatgttacatcttttgggttgcttttattttttatatatgcaggtatagaatccattggacctggtctaaatagggatattcccgctacaatatcttcaaaattgtctggttttagctgtttcataaaacttctcatgccagcactctccaattgaaacacccctagtgtatttcctgatgaaagcatttcatatactttcgggtcgtcataatccatctttgaaaagtctattttttctgtgtagttttttataactctatttttttctattaaatcaagagtatctcttataactgtaagagttcttagcccaagaaaatccatctttaaaagcccaagttcttcaagtgttgtcatagtaaactgtgttgtgattgcatcttgatgtttgtacaaaggtacatattcatctacgggattttttgatataacaactcctgctgcatgagtagaagcatgtcttagcattccctctatctgttttgatatatttattatttcttttgtttccgggtcttggtcatacaattctttaagattaggatttgtatctagggccttatctattgtcattcctaaagcaaatggtatttccttggctaccttgtcaactttattgtagcctatatccaatacccttccaacatctcttattgcagcttttgcacccattgttccaaaagttattatctgggctacatggtcatcaccatattttctctttacataatctataacttcttctcttctctcataacaaaaatctatatctatatctggcatggatatacgttctggatttaaaaaacgctcaaataatagagagtactttattgggtctatatcagttatcttaagtgtatatgctactatcgaaccagccgcactacctctacctggtcctactataatattattttctttagaaaaatttataaaatcccaaacaattaaaaaatactctacataacccattttttcaattacatctaattcataatttaatctctctagtatctcattgctaggattatcatatctctcttttaatccattaaaacacaactcccttaaataagtttctggtgtatatccttctggaacatcatacttaggaagatgtatagtattaaaatcaaactccacattacacatatcagctattttcacagtattgtcaatagcctctaatgcgtatggaaataattcttccatttcttctcttgattttaagtaaaactcatcactaccaaatctcattctatttgggtcatttaatgtttttcccatttgaatacacataagaacatcatgtattttcgaatcttctttatttacatagtgaacatcattagtagcaactagtggtataccagtctcttttgataattttactaaaccagagtttacttctttttgctcaggtaaattgtgatcttgaatctccaaaaagaaattttcttctccaaatatgtctctgtagtcaagagcaaattgttttgctttttcataatttctattcattaaagcacgtgctacatctcctgcaaggcatgcagaaagtgctataatccctttgttatgttttttaagttcttccatgtcaactctaggcttatagtaaaaaccttctacgtatgaagttgaaactatttttattaaatttttatatccttccatattcttagctaacagaactaaatgtccttgatatttgtcatagtttgggtctttatctctcaatccacgtgcagctgtatagacttcgcaccctataattggctttattccttcttttatagctgttttgtagaaatctataacaccaaacatacaaccatggtcagttatagctattgagctcatgtttagttccttagccctttttataagttttttcaccctcgaaaacccatcaagtaaactatactcagtatgtacatgaagatgagcaaaatctttgttcattaaatcacctcctgctttataattttaattttaccacaaatatatgtcctaaaacaaaaacagagacttttatctcaaaataggaattaacttcaacatataccattatatgttataaattaatgcttattctgagattgtcccctcaatttattgctatgatttttttttcaaatctgttgcaatttcttctatttttctaagtctatgattgactccagattttcctattggtggttctaacatctctccaagttctttgagagtcatatcctcatactcgattctaatcttagctatctcttgtaaattttctggcaaactgctaattcctatagtctcttgtatgagcttaatattttctacttgtcttactgctgcatttactgttttagaaaggttagctgtctcacaatttactatcctgtttacattatttctcatttcttttactattttagtattttgaagacttaaaagagcgtggtgtcctcctataatactcaacaaatctgatatttgttcactctctttgatataaacaacgtgattattttttctagccacaattttactattaaaacctaaagagtttataagttcttttagagaatctgcaaactcctcattattagttacaaattccatatgatagttcttttctgggtcgcttatagaacctccaccaagaaaagctcctcttatgaaagctctcttacatccttcatgcttaattaagttctctgaaattttgtttatagtaaaaaagccttctttatcttcaagtatacctaacttttttaataacatttctgaacccatttcgcttgttaccattaatacataactgttatttctctttagcatttgattcttatttactgagattgtagtattgatattaaaattcttttttaataatttaaatactttacgggctattgaatttaactctgttgttatctttagatttagcttcttatatccaacgatttgtatacttccccctgatttaactagagctgataattcagctatattacaacattcattcccagatataactcttgctagttcatttttggtttcagttgaaaaagacatatctatcacctattaactaatttttctttaaccttttttttatttcttgtaaggcaacctttattatctccttttcatcatcatacctagctaggtctaccactctatctagatggataaatttagcatcaataaagccttcctctttttgtggaatagtatccatattctttgcttgcatcaaataccaaaaaactgttttatgaactgctctattttcatcccagttttctttgaatgtatagtgtatttcacctaaatatttcaatatatctgcttttactccagtttcttcacttacttcacgtaatgctgcctcttggttattttccccttcttctacttttcccttgggtaacacccaatctccattgaacttccttagtaaaagaatcgtattgccaaacaggactacaccaccagcactaacctcttctctcatcgatgttcactccttaaaactaacataatgataaggatttctacacaattttttaaaatccttttttactaacttttgttgtaattatgatttagggctaactcaataactatgttagatatatactttgcatcatgtcttatataattattttttatttcaattaaattcttctctacggtttttatacccatctcttttaatttatctttttgctttttatctaacaagacttgctctgctccatcttgtttatataagtcaagcatttcttctggcaatatctcattatttgcgattacataatctattaaattctcatcagtgtgctttactatagcattaacatgctctaatacattgtacccttctgtctcacctggttgagtcattatatttgctatatatacttttggagctacagacgatttaatagcgtctacaatcccctctacaagtaaattgggtattatactcgtatataagcttccagggcccataattataatgtcagcatcgtaaatagatgcaataacatcctttaatggtttgacatcttttggatttaaaaaaattttatcaatagagcttttttgaatttttgactcttcaggtatactagattctccatttattatattgccattttctaatttggcaactaaatttacatcttccaaagttactggtaaaactcttcctgttatagcaaaaatttcacttaatttatatacagctttttcaaagtttccatacaacccattcatagcagccaaaaacaaatttccaaaactctgaccttttaaaagcccttctgtaaacctatattgcataacttcattcattgttggctctatatttgcaagtgctaatagacagtttcttatgtctcctggtgggagcattcctaagtcttctctcaatacacctgaacctccaccatcatcagcaacagttacaattgcagttatattttgcgtagtgtgtttaagacctcttaaaaatactgattgaccagtacctccacctatcacaaccacatttggttctctattttcaacaatagacctttgaaatagttttactttttcattttttgcttttttatatataaataacgatacaattaatgcaatccaacctaaaattcctacaataataagtaatttagccatgtttgcctccattatcgcaacatagagtctctatgtttctttacaactctatatcccttattagataaatcctccgctataagatttgttatagtaactgacctatgtcttccacctgtgcatccaacaccaattactagatgttgttttccttcatctatatattgaggtactaaaaaatgaatcatatctaaaagtttcacataaaattcttcactgattttagaattcataacataatctctaacttctttatcatcaccagttttagctcttaactcttcaacataatagggatttggaagaaatcttacatcaaatactaaatctgcatcagcaagtataccatgtttaaatccaaaagatactacagaaatagttaggtttggattatcttcaccagaagaatatattttctttatttcttccttaaggtctttaggtttcatgttagttgtatcaattatacatgtagataactcctttaaaggttccattatctttctttccatttttataccttctggaatctgcatatcttttgccaatggatgatttcttcttgtcattttatatctctttaacaatacatcatcattacagtccaaatataccatttcatattcataattttctttttctaaataatttaagctttcatgaagcgcttcaaaaaactttctccctcttatatctatccctagagcaactttatcaatacttgaatttggttgataacataattctgcaaatttagttatcaaagcaggaggtagattatctacacaataaaatcccatatcctctaaagctctcattgtctcactttttccagatcctgaaagacctgtaactataacaaatttcattgctaactcctcccttttatcttatgtttattatattataatgttttctactaacgatatatccagattagagtcagatatagtcttcatagctagtttaaaatcaccaactctttctggacaatgtgcatctgagcctattataaatttattttctagcccttttattttatttaattgatttacattcaaaaaagaatggctactatttatttcaagtctagtatttgtcttttttgctgtctttgctacttcttctatatacacatcgcctttatctcctggatgagtaattataaaaatatcattattacttatcgcatttattacagcttttgtattgtattcttttgctttttcagttttaaaaatatagttattacaatgatttaataagcttcttaatgatgttggagtagaaccaaaatgatatccagccataatataatcaaaatctctaataaatttatcatccatatctatattgcctttatcatctaatatgttacactccatacctaaaagtatatttatatcattgtacttatcatttaaataatctacttcttctctcattttgagaatatcttttttctttacaccatatgcaatatgtttatagctatggtcagatattcctattgtttttattcctttagaaatggctacctttacattatcttcaatagtccctttgccatgactatataatgtatgtgtatgataatcagccagtattttcatttgttaatcctctccaagtattttgacttcttcttccaacataaccccaaacttggcatatacagcactttttataacatatattaaatccaaaatatctttagcacttgcttctccttgattgactacaaatccacaatgcttctcagatacttgtgctcctcttaaagtaagacctctcaatccagtttcttctattaatttacctgcaaaatatcctgttggtctcttaaatgtacttcctgcactcgcaaaatttaatggctgtttagttattcttcttgtcgctaaatcatccattaaactttttatttcatcataatttccttcttgtaattctagttctgctgataaagctatatatccgtttttcgatattatactttttctatacccaaattccatctgttcatttgataattcaaatatattgccttccatatccatcagtcttactgacttcactatgtccttcatttcaccaccatatgctccagcattcatggctagtgctcctcccaatgtaccaggtattcctgatgcaaactcaaacccttttaattcttgcttttggagagctttacctaaaactgataataaagctcctgactgagcagtcatcctagtatcatttatctcataagaattgaaattatcagctaattctattaccactcctcttattccaccatctttaattaaaatgtttgaaccatttccaattattaaatacggaatagattcttcttttaccaacttaagtacattttttaattgttcttcagttctaggtctaactaatatatctgctggtcctcctaccctaaatgaaatatgttttttcataggttcatcgacttttatatcctctttacttaatatatttaataaatttatatatatatcttgattattcattgtatttcctcccaaattatactgaactttagctgtcattattatttaaattacattagtatatagtattaactatattcaataatatatgattttgcttatcatatggattttatattttaagcttcttaattacaaactatattcaataaatatataataaagtaaaaaaaaaaaaataacaacatataaaagaatataaataatttaaaaaaagcatcaatatcactgatatcaatgctttaaaaggcaatttaattcgtattatttatctaactatttttgacatagcaaagataataaatccctccaactactatggaacctccaacgatatttccaagcgttacaaataccaaattagttataaattgaaccatagttatatttgctcctaatgccattcccattggtataaaaaacatgtttgcaacactatgttggaatccgcataatacaaataacattattactgtccaacatgaagccaattttgacattatatcttgagatgctgtagccatccatacagctaaaacgactaaaatattacaaagtattgcttttaaaaacattgatgctatagttgaattaaccttagcttctgccacagctatagcttttgtagctgcatctcctgtcaatgtagaagaataaaacacaagtgcaactagcagaattgaacctactaaatttgcaaaataaaccagtccccagtttcttaacatttttcctaatgttatttttttgtccataagtgcaatagccattaaggtgtttccagtgaataattctgctcctgccaccactacaagcataagacctactggaaagaccatagcacttaaaaagctagctacccctgggtctatcttgccaaaagtttgactaactatcatactccccaatgccccaaaacctataaatgctcctccaaataaacctaatagaattgcattttgtgtcgaaatgtttgcttttttaatgcctgcacttatagttgcttgtgcagtttccccaggtgtcaagaatcctttactcataaatccttcccccttaaaaattatactttcccttgtctttttatggcaataattatataataacaatatgatatataataaattttattaacataaaaaatatactatatacttatatatacttgtctcatataattatactatttattatataacaactttgttaatttcgaaataatttatattgaatttgaaaaatttaccttttgattatttattttactttttaattattgaggtattatatataatagatatatgtttgtgttattatatataattacttattttaataaatatttgaaggagggaattttatgtttgatatatcatttttcgaaatgtcaatatatgaaatagcagttactacaatatatataattaatttcatggttatactaaaccttatctttagagaaaaaagaaacataaatacaactttaacatggcttcttatattagtattgattcctgctcttggattcatactttatatagcttttggcagaaatatttcaaaaaacaatatgtttagattgaaagaaaaggatgataagataatcaaaagtaatatactagatactcaggttaaactccaatctacatctgaaattgattcagatatacatcaacataaggatatgatttatgcattggctaattcaaataatgctcattataccaataataacgatgtgtggatttatgctgaatctagtcaattttttaacagtcttcttgaagaacttaaaaaagctaaaaaatatataaacatacaattttacattttcaaagatgacaaaatcggaactgaaataatagacattcttatagacaaagctaaagaaggtgttgaagtaagacttttatttgatgcagttggtggtagaacactaaaaaatagtacactttccagacttaaagaaagtggtgttaaagttggaagcttcttcccatcattcttgaaaattgtaaactttaacttaaactatagaaatcaccgaaaaattgttgtcattgatggtaaggtaggatttgtaggtggatataatgttggtgatgaatatttaggtagaaatccaaaatttggtctatggagagatacacatactaagcttactggtgattgcgtaattgacctaaatatgagattcatccttgattggagatatacaactaaagaagatttagatttagaaaagtactttatagaagaagatacaaattctaatcatccttctgaaaatattgggattcagatagtatcaagtggtccagatatatcagaacttgatgagattaaatatggttaccttaaaatgattcagaaagctagaaagtatatatacatacagagtccttatttaatacttgactcaacttttatagatactttaaaaatagcttgtttatctggtgttgatgtgagagttatgattccttctaaacctgaccatccctttgtatactgggcatcatattcatatgctggagaacttttaaagtttggagctaaaatctacacttatggtcaaaatgcatttttacatgctaagacaatagttatagatgactctatatgctctataggaacagctaatatggatatcagaagttttgagcttaatttcgaagttaatgcatttatgtactcttcaaaaaaagcattggaacaaagaattatatttgaaaatgatattttaaattctaaggaaataacattagatatatataattctaggtctacttatataaaaatcaaggaatcaatttcaagactattatcagcagttttataaatcttttattttataaaaattttacattttggtttattttttaaagttttttatatgtattattttttttttattgaatttagctcattttttttattttttttaactattctgaattattttatattataatagactagtatagtttttatttttaataggtaacttttttgcattgtttttataaataaagaaattgttgtatattattctttctttattgttctggttttgttcacccacataatgttggggtcaactcatggttaattattttatgaaaaataataactttaaaaagaaaagggggatttgttatgtgcgattttatttcacacaacaagcaattatttgacgaactagatatatttattgactctcttacaacaaaggaaggtgcgttaatacaagttctacatgaagcccaaggtatatttggatatcttccaaaagaagttcaacttcatgttgctagaaaacttggagtagctcctgcaaaggtatatggggttgttacattctattcttattttactacagaacctgtaggtaagtataaaatcagtgtctgtctaggaactgtatgttttgtaaaaggtgctgacaaaatcttaagtgcttttgaaaaacagcttggcataaaagttggagaaactactagtgattttaaattttctttagagggtttaagatgtttgggggcatgtggtttagctccagttgttactgtaaatggtaaagtttatggtaaagtgaaacctgaccaagtaagcgaaatattagatacttatagagaattagaattgaattgttaagaggggtgaataaataatgcgtaaagtaaattcatttgatgaattaaaagttttagctgatgagctgaaacctaatcttagcttaagaaaaaattattctaaggaaaatgtattaagaagagaattacttgtttgttgtgatactggatgtacctcttcaaacagtctagaaatagttagtgaattagaaaatgaaataaagaaatcaggaatccaagataaagttagtgttcgtttgacaggttgttttggtttctgtgctcaaggtcctattgtaaaagtttatcctgataacgttttctacgtaaaagttgagccatctgatgctgaaaagatagttcaaagccacttaattagaaatacagttgtcgaggaattattatatgaggaagaatctttaagtaaaaaagttgaagaacaagaagaaatgtctttctacaaaaaacagttacgtatagctttaaaaaattgtggtcttatagacccagatagtatagaagaatatattgccaatgatggttatttagctctaggcaaatgtttaacttctcttactcctcaagaagttattgcagaggtaaaaacttctggccttcgtggtagaggtggtgcaggtttccctactggctctaaatgggaagctgcttcaaaaaatccagctggtccaacagataaaaagtttgttgtatgtaatgctgatgaaggtgacccaggtgcatttatggatcgatctgtacttgaaggtgaccctcatagtgtactagaagctatggcaatatgtggatacgctataggttctgatacaggatacatatacataagagcagaatatccaaaatctatagaaagattaaaagtagccatagctcaagctgaaaaatacggtttacttggcgaaaatatcttaggcactggatttaactttaaattagaattaaaatatggtgcaggtgctttcgtttgtggtgaaggtacagcgctaatgcattcaattgaaggtagacgtggtgaacctagaatgaaaacttatagttcttctaagagtggtctatggaaatctcctacttgcttaaataacgttgagacttttgctaacatacctgcaattatacttaagggtggagattggtttgccaacttaggtactgaagattctagtggtactaaagtctttgctcttggtggaaaagtagaaaatgtaggacttgttgaagttccaatgggtactactttaagagatattgtatttgaaattggtgggggaatccctgaaggtaagaaatttaaggctgttcaaacaggtggaccatctggtggatgtataccaactgaacatttagacactcctatagactttggttcattaagttctatcggttcaatgatgggctctggtggtatgcttgttcttgatgaatctgactgtatggtagatatagccaagttcttccttgagtttactgttgaagaatcttgtggtaaatgtacaccttgtcgtataggtactacaagattattagaaatattaactaaaattacagaaggtaatggtactctacaagatttagatgacctagaaaaccttgctgaaactatacaaactgcttcattatgtggtcttggtaaagctgctccaaaccctgttttaagtactcttcaatatttcaaagatgagtatatagctcatgttgtagataagaaatgtcctgctggtaaatgtcagaacttactttcttactttataacagatgactgtaagggttgtacaaaatgttctagagtgtgtcctgctggttgtataacaggttctgttaaggaacaacatacaatagatacttctaagtgtctaaaatgtggtgcttgtatagataattgtacatttaacgctataatcaagaaataacttatttggaggaggaataacaatgagtttagttaatttaactattaatggcaaacacgtttcagcacctagtggaacttctatcttagatgctgcgaaattaataaatataaaaatacacaacctttgtcatttacatatgaacgaaatagataagcttgacacttgtgcttcttgtcgtatttgtatggttgagacagagagaggcttagttccagcttgtggaacagttataaaggaaggtatgaaagttcagactaatagtgctaaagcattaaatgctcgtagaactattgttgaattattgttatcagaccatccacaagattgttttgtctgtgaaaaaaatggagattgtgaattacagactatagctgctgatttaggagtaagaaaaataagatatcaaggttccaaatcttttgcaggtaaagatacttctactaaatctttagttaaagaccattctaagtgtatattatgtagaagatgtgagactgtatgtaatgacatacaaacagtaggagcattatctggagttaatcgtggatttaatactttagttagtacattctttaactctgatatggttgaaacagagtgtacattctgtggtcaatgtatatctgtctgtccaactggagcattaacagaagtagataatgtacctaaactttgggatgttttaaataaaaaagaaaagactatagtagtgcaagttgctcctgctgtaagagttgctattggtgaagagtttggattagaaccagggtcaatctctacaggaaaaatggtagctgctttaaaagcacttggatttgaacatgtatttgatacaaactttggtgcagattttactataatggaagaagctactgaatttatagaaagaatccaaaaaggtgaaaatcttcctatattaacaagttgttgtcctgcatgggtaaacttcttagaacacaattatccagacaagttaaacttagcatctagctgtaagtctcctcaaggtatgtttggttctatagctaaaaactactatgcacctaaaatattaggaatcaatcctgaagaactttatgttgtatctgtaatgccttgtgtggctaaaaaatatgaagcttcaagagaagaattaagtgaatctggaatactagatgttgacctttctataactactagagagttagctaaaatgataaaagaagctgctatcgatttacctaatcttcaagaccaagattttgataatcctctaggaaaatctacaggtgctgcatctatatttggagcaagtggtggagttttagaagctgccctacgtacttcatatgagaagataactaataagactttagataatgtaaacttcactaatgttagaggtcttaaaggaattagggaagcaagtatagatgttgatggaactacagttaatgtgtgtattgtaaatacacttaaaaatgctagaaagattatggataaggtcagaagtggagaatgtaaataccatatcatagaagttatggcatgtcctggtggatgtgttggaggtgctggtcaaccttatcaccatggtaatactgaaatagttgatagacgtgcaaatgcgttatatgaaatagatagaaataaggctattcgtaaatctcatgagaatcctgatttacaagctatttataaagacttctttggagaaccaaatagtgatgtagcccataaataccttcatactcattactttgataagagttgtgtctatggagagtgtccacaagaatgtgcttgtgaagaagctaagtagtcataacaaagtataaaatttattcttaaaaaaggattgtcttaaaatacttttacgtaatttaagacaatccttattaatttcacaaattaaattatatttctaaatagacttattctttaattaacctatctattaattaaagaatacctgccattctcataagttgttttgcatttgtagttttacatcttccatcttttatcttatagtcaaaatgaattttatcgtctacatagtactctgagaaatgatagtttacaacttcaacatctccactacctgaaaggtcacatagctcaaagtcatgtgttgtcaccatacttataacccagggttttgataatttctttactgcctcacttgctccaataattctatcagcagagttagttcccttaaaaatttcatctactagaaccaacattggcagttcttttaaactatattgaatcattgattttattctaagaatctcagcatagaaagttgatattccttgacttacatcatcttgtattctcatagaagtaaatatagccatacaggtcgcatcaaaactcttagcgcatactggagcacctgcatatgccagcactaagtttacaccgatacttcttaaaaatgttgtctttccagacatatttgaacctgtgataatacaagtctgagaatttaattgtatcgaatttgctatgacacttttttctgctattaatgggtggtatacctcttcaactttcaatcttggagtatcttcatattttattactggaaaacatgtattttcctttacatgagaaataactgttaaacttattagagcttcaaattctccaatagattcaaaccaatctctaatttgatttccatatatacctttccatcgctccaaagcttctgcacaatgatagttccacatcaaaacaccacaggcaattatatatagtatctgattataccttaggtttacagcatttcctattgaatttaattgtttaacacctcttgaaactccacttcccttagaaagtttatcttgtaattctttcaaatatgcactctcaaacgtctctttttctaaaacctcaaacattttttcatatacttgtatacttctactaaatgaaaataatggagaaagagtttgcataagtcttggatatccaaaaccactaaaccctaactggattataaaaagtaaaaaaacaggtaaaacaggtaaaaatcctaacatacaaaatataaaagataagattgttgcagttggtagaccccaagtaaaaatatgcatccattttggtatatacacattcttattttctccatactctataaacgattctatactactatctgaattatttttttgctctttaccaattatattactgagtatttgaatatgaatagaaaaatcatcttttgataaaagttcttttatagccctctgtctttctaagattacattctcatctggattttcattccacaaatatttggctaaaaaatttttcccataagatgtattagctacacagatatattgatacaatgatgctcttccaaataagtctaaatcttttgcttgcgaattttcatcttttaagtattctttaccatctattttaaattccttccaaccatctccaaatctcttaatatacttatttaatacttcgctcttacttttaaaatatgtttcttcttcttttactttactatgaataactaagagtgctataaatattattattgataaaactccaacaaaaatacctactatatttttattgtaaaatccaatagcaaaccctgctatcactatcaaaaaagatattaatcttgctgtacttatgttatttgactttttacttaagagcaattctttttcagtactactttctaaaagtttactaaaatattctattcccataaaaaattccaactttcttgttatataatgaaactcaaatataaaattaatctagtattattataatctaacactgtactttaaattatccttatataatatatcttattaataaacattatatatatacaacttgattttaatttataaggtgtaggacataatcctaatcaatatttaattaaatgatgtgtagttcactattattcagtactacttagtatcgattaattttgataattttttagtaaattcttgagctgcatcgtatcccattcctctttgtctaaaattcattgctgctacttctaatatcatagcagtatttcttccaggtttaacaggtacaactaatttctctacattaacaccaagtatttcttcgtattctttatccagtcctagtctatcataatacttagtttcatcccaagcttctaaatgaactactaaatctatcattttagaatttttgattgcccctactccatataaacttctaacatctattattcctattcctcttatctcaagaaaatgtcttattagttcaggtgactgacccacaagcatactttcatctaattttcttatttctacagcatcatctgcaactaatctattacccctttgaatcagttctaatgctgtttccgactttcctatactactttcaccttttatcagtacacctataccataaatatctactagcaccccgtgaattgttgtgtgtggtgctaacttattatccaaatagtttgacagtctatttataagtctagtggtatttctatttgtgctcaaaagtattcttttatattttttagccttttcaattacatctggcttgatttccaagtctctagaaattattaacgctggtatttcatatgagaaaaatctatctagtacttcttctcgaatatgactatccattaatccaaaaaaattatattctgtctttccaactatttgtattctttcatatgcaaaataatcaaaatatcctgcaaactgtaatcctggtctatttatatcttgagagtagacataataatctacatcatcaggcatgtatactacttttaacttcaactcttttattatctctcttattgatactttattgctagtttccattaattttcttcctttctaaaaaaattataaacattatctgcaatgcttttattcattccatctacttctaaaagttcttccatagtagctttttttatagcctctacatctttaaagtgatttaataatgatttctttcttttttcacctattccttgtatatcatctaagatagattttgtcaaagctttatttcttagacttctatgatatgttattgcataattatgaacttcttcttgtatactagcaataaatctatataaattagttgttttatctagttctatttctttttctttgcatatcaatcctttagttctatgcttatcatctttgtacattccccaaagaggtatatctacatcattgagttctagtactttttttactgcactaacttgtccttttccaccatccaacaatatcaagtcaggtaaatttccatgttttaatcttctatctacaatttcagccatagaatcataatcattaggtccaataactgtctttattttatatctcctatattccttcttatcttttttagcattcgtatacactaccatagaaccaatcgaatctacaccttgtatatttgatatatcataagcctctattcttattggcaacttttctagatttaatatttgttttaattcttccaatgctccaatacttttttcatattttcttttattcatatcagaaaatttttcaagatattctacagcatttttcctaaccatttcaactaagcttttcttctctcccttttgaggaactcttattgttactttttgcccctttttagatgacagccattcttctaatatagaactatcttctatctcatcttctataattaattctttaggtatatactcttgttcattataaaattgttttacaaatgaacttaatatagaagctcttggactatccattacaccttctaatataaaatgttccctacctacaatcttaccatttcttataaaaaatacctggacacaagcttcattatgagctcttgccattgcaaccacatcttggtttaagtcacttacagtagcatctattttttgtttctgtatcatctcttcaaggctctttatcttatccctatatacagcagcctcttcaaatctaaagttcatagaactctcattcattttttcctttaaaagttccatcaatttttcttctttaccagataaacacattataatctcttctatcatttttccatactcttctttagaaacatttcctgtacaaggtcctaaacatttatttatgtgtagatttaaacaaggtcttgtcttattctttattgctttatctatatctattttacagcttcttattggatacgtactacttataagctccaaggtatcattcacagcagttatattggtatagggtccaaaatactttgccttatctttaagaactcttctaacttttaagattcttggataatcttcattcgtagttacttttatatatggataagttttatcatctctaagcactacattatactttggtctgtatctttttattaaattacattcaagtattaatgcctctaactctgaatccgttataatatactcaaacttatatatattcttaaccatagattttactttagatgtatggttttttgaagattgaaaatactgccttaccctattttttagagatatggcttttcccacatatattatatggtcgtatttgtctttcattaaatatactccgggctcagaaggtaatttttttaaatgctcttgtatatcaaacatctcgccctccaaaacattaaattttatactaaaattataccctaaaatatgaattttaaaaagttatacaatttccagtgctttagacaagttaaagtccatattcccttctataattgatttgaaaacaattttaaccatgaagagtaatatggactttactttgtattactatttacaacttatatttgactaatttacttataacaaaacagtttatcgtatatctgctctaaaatttttcacaatttatataacttaagaaaaatatttctttaagaattgacctgtataagaaccatcaactttagatacttcttttggtgttccagttgcaactatagttccacccttatctccgccttctggtcctaagtctattacataatcacaagtctttataacatctaaattatgttctatgactataattgtatttcctgtatctgctagtctttgtaatacttggattagcttgtctacatctgccatatgaagtccagtagtaggttcatctaatatatacaaagtctttcctgttggtcttttactaagttcagcagctaattttatacgttgcgcttctcctcctgataattgagttgaaggctgtcctaatttaatatatgaaagtcctacatccattaaagtttctaattttctttttatatttggtatattttcgaaaaactcaacagcttcttccacattcatatctaatatatcagatatagttttatctttgtattttacttgcaatgtttctctattgtatctttcacctttacaaatttcacaaggaacatatacatctggtaagaaatgcatttctatttttattattccatcacccttacaagcttcacatctaccaccttttacattaaaactaaatctaccttttttataacctcttgctttagcttcattagtagatgcaaaaatatctcttataaaatcaaatacacctgtataagtagcaggatttgaacgaggtgttcttccaataggactttggtctatatttataactttatctatactttcaattccttttatctccttatgcttaccagctctttgcttaagtctattcactttacttgcaacacctttgtaaagtatatcgtttattaatgtactttttccagaacctgaaacacctgttatgcatgtaaacttacctaatgggaactttacatcaatatttttcagattattttctgatgctttaactatttctataaaacttccatttccttctctagtagtctcaggaagcaatatttgttttttaccacttaaatattgacccgttattgagttctcattttcaattatttcatctaaagtaccctgtgcaactatttcaccaccatgtatacctgcacctggaccaatgtctataacataatcagcttctctcattgtgtcttcatcatgctctacaacgattaaggtatttcctaaatctgttagatgtctaagagtagttataagcctatcattatctctttggtgaagccctatacttggctcatcaagtacatataaaactccaaccaatgcagaacctatttgagtagctaatcttatacgttgcgcttctcctcctgataaagttccagcttttcttgataaatttaaataatcaagacctacatctcttaagaacatagctcttccttttatctcttttataatctcatgagctataaatctctgtttttctgtaagatttatattttccataaagtcaatcaattcatttacagataagtttgtaacttccattatattttttccatcaactaaaacagataaaacttcctttttaagtctcatccctttacactttggacatggtctctctgccatgtattcttcaatcttatctctcatgtaatctgaattagtttctctatatcttctctctaagtttactattacaccttcaaagtatgatttataatttctagttcctccaaattttgactcataagtaaactctacaattatattatctttaccataaagtaattcctccacaaaatcatctggtaaatctttaaacggtgttgtcaaagatacattaaaatgctctgctaaactttttatcattttactgtaataagtgtcatcattaacacctgttgaaccccatgctgccactgcaccttgttttattgataaatctttgtttggtactactaattctgggtcaacttctttactttccccaagaccattacaaacatcacaagcaccaaagggagcattaaatgaaaacatccttggagataattcttctatgccaattccatgttctgggcatgcaaatttagttgaaaaaagaatttcttctccatctattatttgggctattacaagaccatcagatagcttaactgcagtttcaattgaatctgctagtcttgattctattccatctttaattactattctgtccactacaacttctatattatgtttttgatttttatttaagattatatcatcactaacttcatagttctcaccattaactctaactcttacaaatccttcttttttgatattatcaaagacttttttatgtgtacctttttgtcctctaacaattggtgaaagaatttgtaatttcgttctatctggaaaatctagcattttatcaactatttcttgaatagtcatctgacttattttttcaccacatgtagggcaatacacatctcctactcttgcaaataatagtctcaaataatcatatatttctgttactgttccaaccgtagaacgtgggttttttgaggtagtcttctggtcaattgagatagctggtgataaaccctctatatattctacatttggcttttccatctgacctaaaaattgtcttgcataagcagatagactttctacatatcttctctgcccttctgcatatattgtatcaaatgccaaagaagacttcccagaccctgacaaacctgtaaaaacaataaatttatctcttggtaattctaaatctatattttttaaattatgttcttttgctcctcttattataattttatcttccataatgttgtttttacctttctatttttccaatttttcttctaattgtttcactttatctctaagttctgctgctctttcaaattgtaagttttgagcagcttccatcatctctgattttaatttatctatattagctcttatttcgtctttatcatctgtatcagatattccatatacaacttcttcctctgcaaccttagtagcttctatactatctcttatatttttctgtatagttttaggaattatattgtgctcttcattatataaattttgtatatctcttcttctctttgtttcatcaatagcattttgcattgagtcagttatcctgtctgcatacataattactcttccattttcatttctagctgcacgtccaatagtctgtattaaagctgtttcggaacgtaagaaaccttctttgtctgcatctaaaattgctataagtgaaacttctggtatatccaatccttctctaagtaagtttattcctacaaggacatcaaacttccctaatcttaaatctcttattatttctgttctttctaatgtaactatatctgagtgtaaatatttaacttttatccctatttctttaagatagttagtcaagtcctcactcatttttttagttaaagtggttataagcactctttcatttttttctatagttttagttatttctcctaccaaatcatctatttgattatttataggtcttacttctacaattgggtctaaaaggccagttggtcttattatctgttctgctattgtctctgagtgttgaatttcataaggtcctggtgtagcacttacaaacaacatttgatttatatttccttcaaattcttgaaaatttaatggtctattgtcaagtgcagaaggtaatctaaaaccattctctataagtgatgtttttctagacctgtctcctgcatacatacctcttacttgtggtatagtgacatgtgcctcatctacaattatcaaataatcatctgggaagaaatccattaaagtatatggtctttctccttctgaccttcctgtaatatgtctagaatagttctctatcccctgacaaaatcctatttcctttaacatttctatatcatacttagttctttgttcaattctttgtgcttctaatagcctatcattttccttgaaaaatttaatttgttcttgaagctcgttttctatttctacaattgccttttcaattctttctggcgttgttacatagtgagatgctgggaatataacaacatgatttctagtaccaacaatcttccctgttacataatcaatttctgttattctatctacctcatcaccaaaaaattctattcttattgctttttcatcattactagctgggaatatttctagtatatctcctctaactctaaaggtacctcgtgtaaagtttatgtcatttctttcgtattgtatctctattaacctttttattacatcatctctgtctctttgcatacctggtcttatagataacataagttctttatagtcttttgggtcaccaagtccatatatacaagatacagatgatattattatagtatctcttctctctaaaatagatgctgtagcagaatgtcgaagtttatctatttcatcatttatgcttgcatctttttctatataagtgtcactgtgagctacatatgcttctggttgataataatcatagtaacttacaaagtattcaactgcattgtctgggaaaaattctttaaactcactgtaaagttgtgctgctagagttttattatgagccattattagggtaggtttcttaacttgttgaatgatatttgccattgtgaatgtttttcctgaacccgttacacctaataatgtcgaaaatttctcatttctatttatagaatccactattgatttaatagcttctggttggtcacctgtaggtttgaagtctgattttattttaaaatccatagtatcactccttttttcgaacattagttcctgacatgtattattatatcatacctttataaaattgtttaagttattttaaatattttacccatttaaattttacttaaatctaaaacataaaaaaagacttctatctttgcaatagaagtctataattcatggaaaataaatactttattcaacttacataataaaatcaaatgcttctttttcaactccatctaattttaaatcaaacatttttaatatagttgctgcatgtgctctcaggtctccttcttctataaccacaccacctttaatatttggtccaaaagctataaatggaggtctattacctttagtaggtaaatgaccatgtgtcgcaacagcaaacttgtaatcttttatatctgaatcttttataatacttccttcgaaatcatttccaaatgaaattccttcaagaccttcaatcaccatttcaaaatcaccttcaagaccaaggttagatgcttcctctttggtaaaaatattctctatgaataattcttctttaaattcttcaagcagttctcttaattctgttaacctatctaagttatttactattatttgagctgatattccagaagaatttacataggcatcaaaatccttaacttctccattttcaacttttataaatccatttgatttaagcaagacatttggatttataactttatcaactctaagatgaccatggtccccaagtattataaaatttgtatctttgtatgtacctgcatcctttgtagcctgaataatatctcctagccatttatcattcatttttaatgctttatctacttcgtcattaaataagccataattatgtcgtgtatggtccaatgtagctaaatgtattagcattaaatctggtttatattcctttattatatctactgaacagtttactccaaataaatccatgttgggttctaatttccaatcaatataatgacaatgtctattgtaaataccgtccattataaccttactggagcttcgttcaaaagtttctcttgggtcatcttctctactaggagcccatatttctgcaatattataatctatatttggatttgctcccattacaggccataatacactagaggtagttagattattttcttttgctacatctataatagtttttacttttatgtcctttgaataccagtaccagtctttattttctttatttgggtcaaatttttcattatgatatataccatgttttttaggatatactcctgtaaccatactagtatgacacggatatgtcagagtgggataaacacaatttatattttttactatggagcaattttctagtatagatttaaagtttggtagattttttacaaattccaagtctttttcaaataaagaatctactgataatactataacctttgtcatttacattacctcttcatttatatattattgaatacttttaatcaacttacaagtctatataattatttatttgttttatctattactgcttgcattgcagaagttcctttgcttactacatcttttggatttgcatttaaatcagtaagcccctttttaatctcatccattagcttatcagttgcttccttgtatccatttaacattggaagtgcaacagcatattgtaattggtcagttgcaaccttatattgaggtttttctttatataatgtttgtaacttttctgagtttgttgcatcttcagttgttggtaagtatcctgttgatgaactaaactgaacgattttatctgtttgtgtcatccattctataaattctgcacttgcttctttttctttatctgttccaccttcaagcataactagattagctccacctgtaggagttgcgtatttttgattttttggtaggaatgctgttgatatttcaaacttaccttctgtttgttgcataagtcctgctaaatctgctgttgatgtaaatatcatacctactttaccatttacaaaatcttgttttgctacgtcccaggcattataatcttctccaggaggcattttcattattccagctttcatcatatcttgccagaatttaactggtgcttgtcctgcctcattattaaatgctacttttttaccattagttatttctcctccactttgcattaccatagcttcatagaaccaaatatctattggtgtttcaaaaccataagtatcttctgatttatttgtcattttactagcgtaatccttaagctcttcccatgattttggacctgaagggtcaagacctgctttagttgccatatctctatttatgtataatattggtgtacttctattaaatggcataccaacaaacttatcctcataatatgaatttgttaaaagaccagaaaagaatctttcttgatatgttttatcaaaatatttactcatatctactaaagcacctgctgatgcgaatgtacctgtttgagttatttctaataatgttacatctggttggtctttagatgttaaggctgcctgtagttttgttgcattttcatagtaatctttctgttttaacatatttacttgtacatccttatgttcactattaaattggtcaaccattttttgagcagtttctccattagttccacctaaaggagcccagaaatctatcttcgtaatattgctatcagtcttttctcctttagatgcatttgcatcattagaatttgaacacccaactaaagaacctaataataatgttattgctaatcctgttgctaattttcttttaagcttcattttcatcctccaaatttagtctttaattttttattttattcctgaatacataaaagcttcttttacttttttattcgcaaatatataaacaagaattattggtaaaattagaattatatttcctgccattattacattccatgcagtaattccttctgaagatttaaggagcgcaactcctattggtaaagttcttattgcatctgtatttgtcattactaagggccagaaataattattccaatggtatataaaattaaataatataaatgttattactgctggttttgccataggaaccattattctaaacattatttttaagtcagaagcattatctagtttagctgcttcaatagtttcatctgaaatctgcataaaattctgtctaagcagaaatatcccaaatgaagatgtcataaatggaattataagtggaatataagtatttataaatccaaacttactcatcatcatatagactggtagaaaagttacttgtggtggaatcataagtcctacaagcaaaagcccaaataacattttttcacctttaaatttaatcttagaaaatgcatatgctgctggaaccataactaaaaattgtaaaattaaaacacttcctgttacaaatacactgtttagtaaatatctaaaaaatggacctgaatgccatgctgtactataattttctaacactatatcatttggtataatagtaggtggtaattgcatcatttcttgtggatttttaaaggatgtcgatagcatccatataaaagggaatataaatattgcagataaaagtaatagaattaatatttccattgattttgatgctattttttttatatcaactttgtcttttttgataggttgtataatatccattgtctcctccttttggataaatcttataatatctactttttctttattgataatgaactttctttgataagagtctaaagttagcatatgtagcaatcataactatagctaacaaaaacatactcgctgcactcgcttgccctatgtcatagtatataaatccagactcatatatataataagataacatgttagttgaacccactggcccaccttgtgtcattatacttatctcatcaaatacttgaaaagatgcagttgttgttgttatcataagaaaaaatattgttggtgataatagcggcaatgtcactttaaagaaattcgttattttgtttgcattatctaatttagatgcttcatatatatagtttggtatggatttaagacctgataatactattaagatattgtatccaagagtcttccatattcctattagaattagtgacattaaagctgaactttcacttgaaagccactttgatgttggtaaatgtaatgtcgatagtatccagtttaaaaagccatattgtggctccataatccaaagccacaatacagctacagatactagtgaaattacatgtggtgtaaagattatactttgcgttaaattgtgtattatagaatttttatttagccaaacagcaagtactatggctagtgatatagatatagtcaccataaaaaaagtataaattgcagtgttcgttatagtttgtataaactctggattctttaaaagttctgtataattgtttaagcctacattttcaaaggttgaactaagaagactaccagatttgaagcttagagatatcgtcttaattattggatagactataaacaataaagttcctataatagcaggtgttatatataaatatgctttattaaattgctttttcataaatatctcctttaattttagaatacatacttttacatacttttacatcttctattctttctccatttttatcaaaataatataaatctttttctaatacacttattcttaaagttcttccaatatcaaatatatcattttccgttttgactcttatttctctattaagaacagataaacaatatatagtttcatttcccaacacttctttagtcacaacttttccaaataggctaaatacatcatcattttttccatctatgtttatactctctagtgttgctttttctggtctgaatccaaatttaatatcattttttatatctagtatgttcatacaaggactccctataaattgagctacaaataaattcttaggattttgatatatcttctttggagaacctatttgcattatctttcctttgttcattataactatcttatctgccattgacattgcctcaacctggtcatgagttacataaacaaatgtagattttagtttttgatgtaattgtattaattctgttctcatttgatttcttaatttagcatctaaatttgacaatggttcatccattaaaaatacctttggatttttaaccatagctctagcaagtgccactctttgtctttgacctccagataagttgcctggtttcacatttaaatattctctcaatcctactacatcaataacttctgttataagtttttctcttttttctttttctacttttttgtttttaagaccaaattctatgttttctctaacagtcatatgtggatataatgcataattttgaaataccatagctatatcccttttactagcatccgtttttgtaacgtcattttcttcaatttttaacttgcctgaagttatatcttcaagacctgcaatcattcttaatgtagtagatttaccacatccacttggacctaccaatactgtaaaagaaccatcttctatagtaagatttaaattttctataactgtattttttttattataagattttgttacattttctagtcttatatctgccatttttatcctcccaaaatatttaatttaattctacgatttacttatagattaataatactcttaatttgtaaaggatatattaagacaaagtgaatatatagtaaacttattaaaataaaggttaaattataaacattttttgttaaatatactgaagttaagatgatatacagcttatgttagctataattttctatatttttcatattcatggtttgctatcacaatgtgattttaatttatgaagagtcatataaaactatttattttttatataatttggtttgaaaataaaaaagacctctatgggggatagaggtctttaagtgggggagattgagtaatttatttttgctatattaagttttacaattatattatgtcccaaatttacaaggtttaaacataaaaaataaaacttttttaatttttataaatttacccaaaaaaaattacgtggctacgtcctactctcccaggcagtttcccaccaagtaccatcagcgctagagagcttaacttctgtgttcggaatgggaacaggtgtatcctctctgctattgtaaccacataatctttatgcttaatatttctattaagtttttaataagtttatagaacctagtaatactagtttctttagagttaacactctaaaaactacacatatatcttaatcaatgaacatcaaataaatattggtcaagtcctcgacctattagtatcgataagctaaatacattgctgcacttacaccttcgacctatcaaccagatagtctttctggggtcttacccttgcggtgggaaatcttatcttgaagttggcttcgcgcttagatgctttcagcgcttatccattccgtacatagctacccagccatgcccttggcaggacaactggtacaccagaggtacgtccatcccggtcctctcgtactaaggacaggtcttctcaaatttcctacgcctgcgacggatagggaccgaactgtctcacgacgttctgaacccagctcgcgtaccactttaatgggcgaacagcccaacccttgggacctactacagccccaggatgtgatgagccgacatcgaggtgccaaacctccccgtcgatgtggactcttgggggagataagcctgttatccccagggtagcttttatccgttgagcgatggcccttccacgcagaaccaccggatcactaagtccgattttcatccttgctcgacctgtatgtcttgcaatcaagctctcttttgcctttacactctacgtacgatttccgaccgtactgagagaacctttgagcgcctccgttaccttttgggaggcgaccgccccagtcaaactgcccacctgacagtgtcccaagaccagattcatggcctatggttagagtcccagtactacaagggtggtatcccaaggatggctccgccaaaactggcgtcctggtttcaaagcctcccacctatcctgtacatgtagtaccaagacccaatgtcaagctacagtaaagctccatggggtctttccgtcctgtcgcaggtatccggcatcttcaccggaattacaatttcaccgagtctgttgttgagacagtgcccaaatcgttacgcctttcgtgcgggtcggaacttacccgacaaggaatttcgctaccttaggaccgttatagttacggccgccgtttactggggcttaagttcactgcttcgattgctctaacagatccccttaaccttccagcaccgggcaggcgtcagctcctatacatcgtcttgcgacttagcagaaacctatgtttttggtaaacagtcgcttgggcctattctctgcggccacctgatggtggcaccccttatccctaagttacggggtcattttgccgagttccttaacaacagttctctcgctggccttaggatactctcctcacccacctgtgtcggtttgcggtacgggtacctttaacctcgatagagacttttcttgacagtgtgaaatcagctacttcgctactaaatttcgctccccatcacatcccagcattatcaaagcggatttgcctactttgactgcctcaatgcttgggcacacataaccaacagtgtgcttagcttatcctactgtgtcatcccttctctcaaacggttatcggtagtacaggaatatcaacctgttgtccatcacctacgcctttcggcctcagcttaggtcccgactaacccagggcggacgaaccttcccctggaaaccttgggtttacggcctgtgggattctcacccacatctcgctactcatgccaacattctcactcccatactgtccacatgtccttacggtcatgcttcaacccgtatgggaagctcccctacccatcattactgatgccgtagcttcggtagtaagttttagccccggaaatcttcggcgcaggatcactcgaccagtgagctattacgcactctttgaatgagtggctgcttctaagccaacatcctggttgtctgtgcaatcccacatcctttaccacttaacttacatttagggaccttagctgacgatctgggctgttgccctttcgactatgaatcttatcacccacagtctgactcccaagtataagatgacggcattcggagtttgatagtcttcggtaggtgcaataccccctaggacattcagtgctctacctccgtatctctcaccttgaggctagccctaaagctatttcggggagaaccagctatctccgggctcgattggaatttcaccgctacccacaagtcatccccgagcttttcaacgctcgtgggttcggacctccacgaaattttactttcgcttcatcctgctcatgggtaggtcgcccggtttcgggtctacgtcaagtaactgaacgctcagttaaaactcgctttcgctacggctccgcaccttaagtgcttaaccttgctacttaacgtaactcgttggcccgttctacaaaaagtacgcggtcacacaagaaatgtgcttccacagcttgtaagtgcagggtttcaggttctatttcactcccctcccggggttcttttcacctttccctcacggtactatacgctatcggtcactaggtagtatttagccttggagggtggtccctcctgcttcccacagggtttcacgtgtcccgtggtactctggatcatatctgaagtcttctcgtttaacatacaggactattaccttctgtggtgggtctttccaaacctcttcaattacgatacctcttcgttatgatatgtccgcaaccccaataaagaaaactttattggtttgggctaatccgcgttcgctcgccgctacttacggaatcgaatttctttctcttccttcaggtacttagatgtttcagttccctgagttcccctcattaagctatgtattcacttaatgatacttagacattactctaagtgagtttcctcattcggaaatcttcggatcaaagtttacgtgcaactccccgaagcttatcgcagcttatcacgtccttcatcggctcctagtgccaaggcatccgccctgcacccttaataacttgaccagttaaaaaggtttgatagattagaagctatcaacttcgataattttaaaaagttatcagctttatatattacaaattagatgtcatatcactaaatatatatatgcagttttcaaagtgctaaagcacggcgccaacggataaatcccgttgcttaaagtgctaacgcacaacgccaacaaacaaacttcacatgcgttcagtttattctgttgctaaaagtgctaattttgagtattcgtaaaaacgaaccctcaaaattaaacagtaggtaattctccttagaaaggaggtgatccagccgcaccttccgatacggctaccttgttacgacttcaccccagttattgattccaccttcgacgacttcttccaaaaggttagataatcggcttcgggcgtctccaactcccgtggtgtgacgggcggtgtgtacaagacccgggaacgcattcaccgcagcattctgatctgcgattactagtaactccagcttcatgtaggcgagtttcagcctacaatccgaactgagagtagctttaagggattagctccaccttacggcttggcaaccctctgtactacccattgtagcacgtgtgtagccctaagcataaggggcatgatgatttgacgtcatccccaccttcctccaggttatccctggcagtctctctagagtgcccaacttaatgatggcaactaaagacaagggttgcgctcgttgcgggacttaacccaacatctcacgacacgagctgacgacaaccatgcaccacctgtcaccaatgtccccgaagggaactctccgattaaggagatgtcattgggatgtcaagcttaggtaaggttcttcgcgttgcttcgaattaaaccacatgctccgctacttgtgcgggtccccgtcaattcctttgagtttcactcttgcgagcgtacttcccaggcggagtacttaatgcgttagctgcggcaccgaagggggtaacccccgacacctagtactcatcgtttacagcgtggactaccagggtatctaatcctgtttgctccccacgctttcgtgcctcagcgtcagttacagtccagagagccgccttcgcaactggtgttcctcctaatatctacgcatttcaccgctacactaggaattccactctcctctcctgcactcaagtctcccagtttcaagagcttactacggttgagccgtagcctttcactcctgacttgaaagaccgcctacgcaccctttacgcccagtaaatccggataacgctagccccctacgtattaccgcggctgctggcacgtagttagccggggcttcctcctcaagtaccgtcattatcttccttgaggacagagttttacgacccgaaggccttcatcactcacgcggcgttgctgcatcaggctttcgcccattgtgcaatattccccactgctgcctcccgtaggagtttggaccgtgtctcagttccaatgtggccgatcaccctctcaggtcggctactgatcgtcgccttggtaagccgttaccttaccaactagctaatcagacgcgggtccatcctgtactggctcacctttgatattcaagagatgcctctcaaatatattatcccgtattagcatacctttcggtatgttatccgtgtgtacagggtaggttacccacgcgttactcacccgtccgccgctctttaccgaagtaaatcgctcaacttgcatgtgttaggcacgccgccagcgttcatcctgagccaggatcaaactctcaaataaaagtttatcaggctcagatactattgttatcaaaatatctggctttatggtttgtttcttgttttataaattaacctactgtttaattttcaaagttcattttttatgtttgcccttttcttaaggacaagtaacactatatcatcttaaaaataatccgtcaacacctttttaacattttttattttattttttatatatcaaacttcttaagttcttctaggtcaagtgttaccaacatattaagcacatcttttcttttacttttatcttcgtatttttttataaccttttttcttatatctcctaatacatttaaatactcctcataatcttcagtatatctctcttcaatttctttttttatctttgatgataatgaaggactcttgcccccagtagacacacttataagtaaatctcctctttttatatatgatggaacagtaaagttcgatatttctatattatcaactacattcactagcttattttttgctctacaatataatcctatttccatatttaactctctattatttgtggcagcaattattacagaagcatcttttatatatatttctttataatcatcttttattatttttatatttccttttaaatcataaaatttatttaaaatttgtttagaaactatagtaacatttttgttaaactctaaaaaatttttacatttcctatatgcaacttctccaccaccaattataactacatctaactcatctaattttaaattaataggatatagcatcttctacctccaaattttatttagttacataaataaagtatagaaattgtaaattagtttctattattcttcaataaatgtctaaacaaaactactgtataatagttaattacaattcctatactttttgatattctttatactactagaatttattttttcaacagtttagcaatgtctttagcaaaataagttattattatatctgctcctgctctttttatagatgtaattgattcaagaattacatcttcatttaataaaccttccttcacagcaaacttaagcatagagtattctccacttacattataagctgctagaggtaagtcaaaattatctttaactcttcttataatatctaaatatgataatgcaggtttaaccataagtatatctgcaccttccaatatatcaagttcagtctctattatagcttcattgctatttgctgggtccatttgatatgtttttctatctccaaaagatggtgctgaatgagctgcctctctaaaaggtccataataatttgaagcatacttaacactataagccatgattccaacattttctaatccattttcatctaaagcttctcttattgcttgtattcttccatccatcatatcagatggagcaaccatatcagctcctgctttagcatggcttacagatattttagccaaatactccaatgatttatcattatcaacataaccagtatcagttaaaatcccacaatgtccatgacttgtatattggcacatacagacatctgttattacatttatatctgaatttatttcttttacctttctaattgccttttgaactattccattatcattaaaagcttgtgaagcacactcatctttttcatctggaacaccaaataacattatatgttcaattcccaactcacttatttcttttatttcgtcttctagcatgtctattgataaatgatatacatctggtaaagaattgatttcttcttttatattttccccctctactacaaacagtggatatattaaatcttctacattcaccttagtttctcttaccaaatttctgattgctttacttgctcttagtcttcttggtcttcttaacatattcaagcctccaaaattaattttttataattaaatctactaacgaatctatagtagatgtagcagattctttgtacaattttattcccaaactatttattgtctctgtagttataggacctatagatagtgtttttattttttctaatattttaatattttcttttcctataatttcaacaagattatttactgttgaggaactagtaaatgttatataatctatatcattagaatttaaaatatctaatatctcaccttttttatcctcatctattactgttctatatatatgtacttctgttacttcacaaatagccttaagtttgtcaaccagataatctctagcattttctgctctaggtataagtatattatcgttatcatttaaaataggagctaactcttcatacagtgactctgctacaaatttttttggtactatatccgctataattcctctttttttcaactcatttgatgtagcagaacctatagcacatacctttaaattagataatatccttaaatcaaaattcatttcatatatcttttcaaagaagatttctacggcatttttactagttagtattaaataattatacttatttatattttttatttcattttctaagttaatattattttgtattttttctaccttaatagtaggtatttctataggatttccacctaaatccattattttttctaccaatacactattttgatttctagacctagttacagcaatactttttccaaataaaggcttactttcaaagaagttcaacttttctctaagtcctacaacactcccaactactataagagttggcggttttacttcttctttaatagcagtttcataaacattctcaagtgtagatgtaacaactctttgattatatctagttgcccaacttataagagcaacaggtgtatccttatcttttccttctttcattaagttttcacttattttctctaggtttgaaattcccatcaaaaacacaagagtacctttgttatttgcaagagcattccagtttaattctccactatcatcacccttcaaatgacctgttattacatgaaatgacgaagcatggtctctatgtgttataggaatacccgcataacataaacctcctatagcagaagttatacctggaactacttcaaattctatatcttcatctactaaagtctctgcttcttctccccctctgccaaatacataagggtctcctcctttaagacgagttacaatttttccttctttagctttttctgctataattctatttatatcttcttgtggcaaaatatgattacttgatgccttgcctacatatataagttcacaatcaggcttagcttctcttaaataactactatttgctaatctatcatatactattacatccgattttcttatacactctaaaccttttaaagtcatgagtttataatcacctggtcctgcccctactaagtaaaccttacccttcataattctcatactccttcaatacaagtttagctaactttaaacctaactctctaggagaagaaatatctccatctatagacttgattactactttttttccttctgaatctccatataagccagtaagatgtattttatcttggattatttcacaataagctgccattggaatatgacaacttccatttacaccatctaaaaaacctctttcagccaatatttggatttctgtattctcatccttcagtgaatttactattccctctatcgtactatcattgcttctaatttctatagctaaagctccttgggcaggtgctggaataacaacatcaacaggtaaataagaacttattttatcttgcaaattagctctaattattcctgatgctgccaacacaataccatgcatgttttcatcttttatttttcgtatcctagtttccacattacctctaacttgtactatatttaaatcaggtctttgtttcaataattgaaacttccttcttttacttcctgttcctattactgctccatgaggcaaatcatctaaatttttatatccttctctaagtattagaacatctcttgggtcttctctcttaggcgtatgagcaaattttagtccatctgctaaataagaaggcatatctttcatactatgtactgctatgtctatttttccatctaataattgttgctctatttctttgacaaacaatcctttatcacctattttatccagtgaaacattttgaattaaatctccttttgtctttatgattttaatctcaaaactaatttctggatacttcttttttaattcatttattacccactctgtttgtataagcgctagagtactacccctagttccaaccactatattcatattaagtctcctttaaatattgctttcacctattttattttattatctttatttactagtatagtagaaaaataagatatcttatcttcaaggtgcgcttcttttaaatctgtaaacacattttcgctttcttgggaagaattacttactaaaatagcatgttctattaaatcatacttttctaatttttttattatttctttaaaatttttatataccttcatcaatactattgaattataattttgcaaagcatactctatcttatcatcttccatagtacaaggaattaccactaaagcttctttatccatgactaatggaaaattctgattagatgctatattggaaaatgatgaaattcctggtatagtttcgacttctacctctcctaatattcttttcattatatatacatatgtactataaatcatagggtctcctaatgtaacaaatcctacatttttaccatcattaacatctgatataatttcttgtgctacattgtcccaagctaaacttttttcattcccatcaaaactcattgggaaatgcctagactttatttccactgattcaggtaaatattcactaactattgataaagctagactatctccacccttttttgattctggagtgtatagaatatccagtttctttaaagtattaaccgcttttatcgtaagtaaagaaccatctcctggccctgctcctataccatagaacttagcattctctgcacattttacagcatgacgaacaaatttatcttgtatataagaattttctcctagtccttttaaatgaactcttacgtcaaatccatcttcttctaatattgttttccaagaatcttcttcatctcctgccatatcatttatagcatggtctcctgcaactaacataaatggcatcaaatttacagtttttatatttccttcttttaatcttcttattacatgttctatttctggatacccttcaactgtaccaacataagcatttattccattatccctaagcatgtattccaatgctggatacgctgaatgtgattcatgaagtgttccatgtcccataaatactactgcttcattactttccatatgaggaatttgatgcttaattgcctctacagcttcctgataatcttcaatatgtgtaagcaaaggtcttcctaatacaatctttttgaatttagaagaatatccatctacttgttcttttaatttgttaaattcttcgccacatataatatgaagtgtttggattattacttcatcatatccttgttcatatattttatctaaagcctgtattggattatctatttctattccatcccttttttttattttatttattatcatatttgatgtataagctctaaaaaaatcatggctttttaacgaattttttattttatcttcacatatatctattgtcttttctctcgtttcatgatagcttgtaccaaaactcactactaataaggctttcttcatatattctcctcctaaaaattacacaagtatgtctttaattttatttatgtcattaaatacattttcgtagttaatcgattctctttttataattattactggtatattgaaagttttacatgcatttaccttctctaagaacccaccagctattccactttcttttgttatgactaaatctatattgtaatgtttatatgtttcttcatttatatactggctaaatggacctttcatagctactatattatctgcacttaaacctaatttttcacaacttaatatgacttcactcgttggaagaactctaacaactaaatttttatcacttatttcctctataaatctgttcaaatttttacttcctgttcctatgaatatatttgtccctattttatttgctatttcacaggcttcttcaattgtatctactataaatttattatcataatctatttcttcaattaaagattttctctcaaaccttatataatctatattcaataattttgcacaagtaatagcagttttggatacttcaactgcataaggatgagtggcatctattatttttactatattattatcttttataaattttagcatatcttcttttccaagcttacctaaaattacattctctgcatgttgttgtgcaagttcccttccataatctgtagtaactgaaaggatatatggttgatttttcagttcatttatcttatcacatatagataaactatctgaagttcctcctaaaattaaaatcatactgtataacctcttggagttatcatcaattcaccattaatataggtagacttatttcctattataaccattgtagtcatatcgactttttcaaagtccatattttcaaaagtacatacaaacttttcttctttttctctacctacatcttttaccactccaacaggtgtatctccacctttaaactcacccattattttaaatgctttgcttagatgttcacttcttcccttacttcttggattatacaaacaaattacaaaatcggcttcagcagccaatctcaatcttttttcaattacttcccacggagtcattaaatcactcaaacttatatgacagaaatcatgcataataggagctccaagtatagctgctgcaccaatacttgcagtaacacctggaattacctttacttttatatcttcatcttctttagatattaattctaaaatgagacctgccatcccatatattccagcatcaccactgcttacaactgctactttttttccttttttcgcttcctctactgcttgtttacatctatcaacttcttgcctcataccattttggattatttctttaccttgtataaattcttctattagttttatataagtcttatatccaacaatagcctcagaatcttctattgcttttattgcttctaaagtcattgtatctttacttcctggtccaattcctacaacgtatatcatatttttattctccccactgaaaaagttattcctttatatttatgtttttcaactaacaaattacctttgctcaaaagatatgctataggttctgctactgaatacacgcccacattttttttaacaaaatcagatttatcaaaaagattatcaaccttagatatttcatctattgaaaatgttttaaatggcacttttagtatttttgataattcaattattgctttttcgtcttttttcagttctatacttccaactgtgtttattgctctaatatctatattttgtttattaagaaactcttcaagtgaattatacatcagctcactatctgtgtttcttctacagccaattcctatcactatatctcttggaattacctttattatttttttagtactatagcaatgttcaaatttattatctaagtttaaattctcaatatcttcaatacaatttattttattgcttactacaactaatttttctatatatgtgtttgaaaagctatctcttaactcatccttactttctataagtttaaatcccctagtatcaacttgatatccttcatcaacatataatccaacacatttattattcactagcatagaatttacttcttttacactttctctaaaattatcaatatgtgcatttagtttttttgctatcatatctaaggaagctttttgatttatatcagtagctgttgttattactggattagcatcaataagactacttatgtactgtgtcaagctgtttgcccctccaatatgaccactcaataaacttattacgtttttgcctttttcatccattaccaaaattgcagggtcactaaacttacttattatgtatggtgctatacttcgtacaactatacctgtagccattataaatattatgtaatcaaatttgctaaatatttctcctacaaaatcacttaacttcttttgaactgtatgtacacatgtttcttcaacaactaaattactttttttattttttacttgatatataacacagttatttactagagaatttatctttacagctaaattttttccattttctgtaatacagattatagcaatattaccctctatattcatgtttgaaatccttatcatataactttgaattattatactcttctcctaaaaatctcccaaccattattaaagcagtcttatttatgttgttttctttaacttttacagctatatcacttaaagttcctttaactattttttcatctgcccaagttgctttgtatataactgctataggagtatcttttggatatccaccttccagtaatttagacacaactttctcaatttcttgaacagataaaaatattaccatagatgtctgatgcttagcatatgattgtattgattctttctctggaaccggagttctgccttccattcttgttataattacactttgagaaatttctggaactgtatattcaacccctaaagatgatgctgcccctaaaaaagaacttactccaggagtacagtcataatctatattcaatttatttaaatcttccacttgttctctaattgaaccatatatagaaaaatcacctgtttgcagtcttacaacagatttattattttctataccttctctcataacatctattatctcttgtaaatccatatgtgcactattatgtatttggcaatcttctttacagtattccaaaagttcaggattaacaagtgaacctgcatatatcactacatctgcattacttaataatttgtatccttttaatgttatcagctctttatctccaggtcctgctcctacaaaatgtactttattcatcatcattttcccctttttcacaagatattatatatataggatttagtggtttaaaatattcaccttttcctagtttctctagtttagaaacattcaaaacacatacatctatttctttaaatccatgctttttaagcagttttaaagtttgattaaatgtatctattattataaaattagctacaagtcttcctcctgtaacgagattttttttagaccattctattatttcttccagattatttcctgttcccccaagaaaaatagactcaactttaacatttaaccctagattaattggagcatatccttttatcacttctatattttttaagttgaatttttttatatttttctctataagctctatagcgtcatcatttttctctatagatataacctttaaattaggataattatatgcagcttcaacacttacacttcctgtaccagcccctatgtctatgaggtttttagcatttactaaatttaacttacttattgatattgctctaacctcttccttagtaattggaactttacctgttataaattcactattcctcatctaaaatcaccacaacattcatatcaaaattgtccattcttattatctcttctggtttcgctattgttattttttcattgtcatatgacagattttctcctacaacaataattttatttagatttctatctattatttctctacttatttgttttggtcctatctttgaatctgtaaccatacatacttttttatgtgataatatgtaatcaaaatctggtattttgccatgactacttgtaatatatacatcattcatatctacatatatttttgaaaatatgtactgtaatgaactaatcccagaaaccacgtttaacatcttattatcaatatttttagatagatatctacctatcccatatattaatgggtccccagatgctattattgatatttgcttttctttattgttatttatgtactctataatttctcttaaattagaatccagaactattttttctccttcaaaattttttatagactctagatttcttttaccaccaattaatacatcagaagtggaaattaaattttcacctttttttgttatatagtctaagttaccaggtcctagacctattatgtttatcatataaagacctccactaaatcatctgtattatccgatttacctaataaagacttatccattgaaaatatgattacttccacatcaatatcatctgaatcttcattcaagtattgctttactctctccttacatttattacttaatatattatatacttctctatattcactattatttattagctctacagcttcttcagtagttacgcattgatttattttatttaaaaattcgtatctagctcccattaaagctaagtttgccactaatatctcacttctagcatctgctaccttactatgagtattaaaaataccagcagatacttttataaatttacctatatgacctgccattaagatttttttatatcctattctttgagcttctttaatcatatagcctataaaattacttaccctaactacatacttaatatctaagtttaatttttctcttataaactgttctccatgatttcctggaaccaatattattttatctaagccttgttcttttttcatctgaagttctatagaaagagacttcttccaaccctcatcactcataggttcaacaatcccagttgtacctattatagatattcctccaactatacctaatcttggattaaatgttttttttgctacagtttctccttgtggagcaaagattgttatttttaaaactttatcatttccaagtatagattcaaaattatctcctataagctttcttatttcatggtttatcattttaagtggagtcggatttatagcaggtttaccaacatccacactaagcccttttttcgtaaccacaccaataccagttccgccataaaccctaataaacttatagagctcacttttacactcactattggtgcttaaactatctatatcctttagagtaagataccctttgttcttatcatttttagctacaatttcagctcttgcataaatatccatggtatgagttgcatctatatcatctccaccatctttttttatggaacattccacaaatgtatcagaaatatttatattatcaacttttagtagtaatggtatccccttaggagtatctatatttatagtattgattctattttttgtaatcaacatatatacagcagccttagatgcacctgttgcacatgaacctgtagtatatcctcttctatatttttttccatctatatatacatattcttccatataggtacctacatagtatataatatagcatttactattgctgctgctaaattactgccaccttttctacctttagaaattatatatggtatatctgttttttcaacttcatcttttgattcttgtgctcctacaaaacctacaggaactcctataactgcatctaaatctaatctaccttctgatttcatctccataactttatataaagctgttggagcattacctaaaacgaatatttttcttccttcttctttagctgcaatttctactgctgccatagaacgagtaattcctttttctttagctaattttacagtttcatcatctgccactaaacatttatacttacatcctaatgattctaactttcttttatttataccactaagagccatatttgtatcagtataaatacttgcattattttttaatgcatctattatactatcaactgcttcttctgatatttttaatatatctaagtaatcaaaatcagcagtagtatgtatagctctttttattattttttcttcaatattattcttaaatttataatctggtctaatttcgtctattatttcttgtatcaattcaaaacttttttcttctattttcataggattctttatgtattccattctatttcccccttaattcctccattaattatgttttgtgtataaattttattatagacagaatttatgttagattcacataaggtatctatcatctttttatcattcatagacttatcaattaaaatacctactacagttccactgtgagcaatatttactccatatgctccatatttttttgatatttttattatttcatttaaatactcttttttttctatattctcatttgctaagctactcaaagtacaagcctctccaactagagataaattattttttttcaatccttcttctaaaagagcaaatgatttttttattacttctttattttctacttttaatttattataatcttgcctcaatctaattttcatagtatctagtactttgtttggttcaagtattataactttcgcattggtcagatttcctaggtattttataacagttccatttagaggattaaatatactatttttatctataaatatagaatctgttggttctatttctgctgctaatttagaaatctcctcactacttaaatctttatctatcaatgataatgttgcctttattgtagctcctatatcagcagttgaacttgccattccttttccaacaggtattttactatttatatttaaagaaatatttttagtatattttttaggtaaattaaatttttcaaataccttttcaattgctaaccttgacttatatctccctaaatttatatctactaatttttcttcaatatacacttcagaatacatatctattgcatatgaacataaatattcttcatcatcaattataccttgtacaaattctccacaagatgctgggcatattccataagatttcattttaatcacccaataaatttttcatattttctataagaattttgttatcttcatgagattttatagccactcttataaaactatcatctaatcctataaaattagacgcatctctaactaatatgtttccttgcttaagcaaatcttttttcaattctttagttgtttttttatatgctcttatcaaaataaaattagcatctgtatcatagacctttatatttcttatgtttctcaactcttgtaacatatattttctttcttctatgtaatattctttactatttttaatatactctttatcttcaaaaataaaattggatagtatatctgcaaaagaattaatagtccatggctctttgtgttcataaattttgttcataatttcagtgttgcttgtaagaccatatcctagccttaaaccaggcataccaaaaaacttagtcacagctttaattataaatatatttttatttgattctatatatttaaccaaactgtatttactttcatcttcaacaaattccatgaaagtttcatcaattattagtaccttattatgtttacctagtaaatgaacaagttcctttaaatcttggacattaccactaggattattaggattacatataaataaactatcaaatctttttatattttcttttattatatctatattaagtttaaagttattttctaaatctagctctaaatctataatatctaaattatttaactcagcacttcttctatactctgaaaaagtcggatttattatagccaatttttttttaacactcttcataagcaaataaatcacttctgttgcaccatttccaggtattataaagtctggatttatacctatatattttgatatattttctctcaagtttgtataatttatatctggataattcctacactcttctaatccttttaaaatgtatctctctaaatttggtaatacatttggatttatgtttgaactaaaatcaattatttcttttgggtttttcccatataatcttgccatttcacctacattggcaccatgccctaaatccttcatctatgtcccccttaagttagcaaacaataatttatataattaagttaattaaaatcatcctacataacacatgtattagtgtaaataccaacatagatacaaatgaagatacatacataattttattagttttaattatatcttctttatctatctccctaagcttatcccctattgttggcttatatactttttccccaaaataaacgttggtacctcctagttgtattcctagagcaccagatactgcgccttctgaaaaagcacaatttggacttttatgattctttctatctctaatagagattttaaaacagttcctatagttataatttaaaaagaaacttccaattgtcataagaataacagatattctagctggtatataattggctatatcatcaatcttagcagatgcaaaaccaatatctttatactttttatttttatatccaactgttgagtctaatgtatttatagctttataggccatagcaagtggtgctcctccaataaatgcataaaacataggcgcaattataccatctacagtattttctgcaacagtttctacagttgctcttattatttcaggttcacttaaattagtagtatccctacctactatataagatagctgaatcctagatttttctatatcttcggtttttaatacattataaatttttaatgcttcgtcttttaaacattttgtggctagtgttgtataaattataaaactattcactacaatactcaataatatattaaaactaaatagcttcactatagcataagttgttaaatatgttattccaacggttataaaccataatataaatcccccaaattttaactgcctatcatttttagagacctttcttattataccttgagtaaaatttataagtttaccaataaatctcactggatgaggaaaagaatatgggtctcctacaattaagtctgtcacatatcctatataaatagataaaatactcatttattcatttccttttttcaaaaaattttctatacaatttaagttattataaaaatgagtatgaagatatgtagccaaagtgtttcctttactataaccaccatcccactcttctactatatttccatctctttcttttctcattgaatatacacatttttcatcactttcaaatattgaatgatgaaactcatgccctttaatagattccccttttttagataaaagagtattttccttggctacaccaatacagtacccaaatctctttaaagaagatgtcatcttactaattccactaaatattccaaccatattaaattcttgttcttcttgattcaatagtttctcacctaggtacatcagtcctccacattctgcataaataggtatattattgttatgtgcttctaatatggaagttctcattgactcatttgcttctaattcttttccaaatatttctggaaaacctcctccaatataaatataatctgcatttggcactgatgcatcttcaagagggctaaaatagtttatttctaaaccaagttcctctaaaagctctatattttctctataataaaaattgaatgctttatcatatgctatagctattgatttattattaacatgttcttttattttattattttctatcaaagtttgaaaatcaaaatcactctcaaattcatcgctttctgatatttcaattattctgtcaatatctatatagtgttcaatttcatctgctaaggtataaaatttttcccttagtgatttcatttctacactaggaactaatcctagatgtcgagattctaaagagaatttgttatttggaggaaaataccccaatacttcaacattacaatatttttctatagaactcttaattatttgataatggctattagtctttacattatttactataacaccctttatatttacatctttatctaattccttatatccaagtaccatagcagcactagatgctgccatagatttaccatttataactaatataacaggtgactttaatacctttgaagtatgtgaacttgtacaattatctaaatctattccaaaaccatcatataagcccataacaccttctattactgaaatatctgcatcttttgaggacttatttactatatactttattttttcatcatctaacatataagaatctaaatttctagaatgtcttccagttataaaagtgtgatatgaagggtctatatagtctggccctactttatatggctgtactttcatatttctcttaaccaaagcttgcattattcctaatgatattgttgttttacctactccactattagtaccagcaattaaaatttttttcataatacacctcctacctaaattataaataaaggtcatcattatttcataatctcatatattttctctatatctaaatgttctcttaaaaaatcagccaacttatcatactctttatccttaaattcattaaaagagtttactttgctttctaattctcctaaaccttttttctttcttatattgtttaaaattgctcttgtaaagcttatttcatcaaatattccatgaagataagtcccaattacattcccctctttatttacacttccttcagtataattcacttctttatcaagttttttagttattaaatctaaacttcttacatcattacctcgctttgtaatgcccatatgaatttcataaccttttactttttttcccttaaggttattcatgtattcactgatacattcaacaatagtagcctctacttgtgttgtagtcttttctttctcaaacgttgtttctgtatctaaaagacctattccatcaacttcttcaatttcactttcaacatgataagggtcttttaattttttacctaacatttggtatccaccacatatcccaaatatcaatttaccttgactatgtaaatttttgatttgcgattcaagaccactttttcttatatatgttaaatcgtctatagtacttttagttccaggtattattaatatatctggatttcctaaagattctccatagtctacatatctaatacttacatcttcttgtgtctcaaatatattaaaatctgtaaaatttgacatatgtggggttctaattatttctatgtgtatatcacttttattcatttttttcttaaatctcgtagttacactgtcttcatcttctatttttatatctgtataaggtactactcctataacaggtacttttatgatgtcttctagcatctttacaccatcttgtaaaagctctttttttcctctgaatttattgattattacaccttttactcttcttttctcatcttcatttaataaaagcattgttcctgctaatgaggcaaatacgcctcctctatcaatatctccgactattattacaggtgcatcagctatttctgccatacccatattagagatatctctatcttttaagtttatctctgcattacttcctgccccttccataactacaatatcataccttgaatttaagctattaaatgtttccttcaacacacctactaactccaatttataatcatgatacttagaagaaggcatttctcctacaactttacctcttacaataacttgacttttattattcccagaaggttttaataaaactggattcatatcagctattggctctattttcgcagcctctgcttgaaatacttgtgctcttcccatttctaatccttctttagttataaaagaatttaaagccatattttgtgacttaaaaggagcaacagtataaccatcttgcttaaatattctacacaaacctgctactaagacacttttacctacatttgaagctgttccttgtagcattatttttttccccactttccatccctccttgttaaaatttactaaaaaacaaattaaaaaaagtcctaatacttctaaagataggacttttatatatattaattaaaaatctttcaccccgaagacctcttgttttaaattaaattaggcaggtatcctggcttaacttcatcctacttctataaccttcccatcaaactgacagtggtatttatagtttcgttggtttcacagtagcgggggctgcaaaggcatctaacctttttcccttttaacatctaattaagaacctaattttaatctaatattctattttcattgctaattttacagatatattacaaacacagattgtaatgtttggttttgattaaattatatgaagtctgtaaaattcattttatctattacagcaaatccaccatcaatttctaaaactgtaatagatgcattatcaattttaaagttccagtgatacttataactaccagaaatcaaatgtgttattatatttcttattgttcctgcatgagaacatataagtattgtctttgtatctaaattactatcattttctaaaattatattatcaatttcttttgccactcttttataagagtctatcaaactttctccatttggatatctatagttgttaccttcttttatcattttttcaaactcatttggatatttgattttaatttcttcaaaagttcttccttcaaagtctccaaaactaatttctcttaaagcttctttttcttctatttctaataatttcaattttgatattttttctactgtatctttagtacgtgtagatggtgttgtataaaccttatctatgttttcattactcagatatctggtaattttatttatttgtagtttgccctcttcactaatacaactatttatatggcctgataatcttccttttttattatcatttgtcagtgcatgtcttattaatattaatcttatcatattatcaccactttttactttaaaaaaacataaaaattaacaaatatatgtaaattaaatatacaagctctgaaagttctattccacagcctaatatatctcctgttactccgtcaatttttttataaatatgttttttgaataatattataaatacaaaaaccactataatcgaacctaatactttaatcaacactatattaggtaataaaaatataaatttagtaataagagcaactatcaataatgtgtatattatagcagttattaacatacttgtagttaattttcctataaataaatttcccattcctttttctcttggtgtcacggttttatatgtcaataacattactcctaaccttgcaatcattggcataaaaattataatccacaatgaattattacttattatatcgtaaacgaatccaacctttaataaaagtacaaacataattgctagaagtgaatttgtacctaatcttgaatctttcattatttcaagcattttttctttatccctataactatatattgcatcaaatgtatctcctaatccatctatatgaagtcctccagtaattaagacaccagctagagttattattatagaagctataaatggttcaaataaaagcatagaaatccatcctattaaataggataatatacctatgacaaaacctacaagtggaaaatatactattgacttataaaattcatcatcaaatcctacatttaattttataggtatccttgtcaaaaactgtagtattaaaataaatcttttcataattgcatactactcctttatcttcatagctatgccactaactacaaaataaacttcattacttttcgaagctatatattgatttatacgacctacaatatcagcataaattctactaagtttattcccaggaacaattcccatacctaactcattcgttacaaatacaaagtatagatttgttttttctatttcttcaataagtttgacaacttgttcttttatgtattgttctaatttgtttatttcttcttgactagactcttctatatttagattgtgttcaaacattagattatttactaataatgttacacaatctagtataacagtttcatgttctttatatatctccttaattatggaatatatatcttcatatatttcataagtattccagtttctaggtctattctcttgatgtttttttactctatctttcatttcatcatcaaatggaatagaggttgctatataagctgtattattatttctgtcaaaacatagtttttctgcaaagttactcttccctgacctagctcctcctgttactagaataattttactcatcaaaacactcctacatattaaatttttatatttatcttcccatgtcaatttcatcaaaagttgccatatttttgtaagtatagtttgaagcttctattatatcaaatgctaaagcagctccacttccctcacctaatctcatatccatatttaatagagggtctaattttaatatgtctaatgctcttttagttcctgattctgctgataaatgagatgctatcatatattctctagtttttggatttatcttatatgcaattaatgctgctgcataagaaataaacccatcaattactactggaatcctattagcactacaacctaatataacacctgccattgagcctatttcaaatcctcctactttagataaaatatctactccatcagttggatttggattattaatttcaatagcctttctaattacttcagccttatgctttagtctttctttcttaagacctgcacctataccagtaacttctaacgggtcacaccctgaaattacagatattattgctgtacttggagtagtatttgctatacccatctccccaataccaataaccttataatctttttctatacactgctctgctatttcaatacctatctctaaacatctaatggcttcttgtttactcatagctggaccttttgccatatttgatgtcccttttcttatcttgtagtctaataccccatccagtttttcatcacagtttattcctacatctacagctacaacatctgcccctacaaatttacttattactccaactccacatagacctttcgaaaaatttggaaactgtaattttgttatattttgagggtcaggtgctacgccttcttcatatacaccatggtctcccgcaaaagcaattataacctttttacttgtgtcaaaattttcattgccaaatattcctgccaattgcatgcaaatatcttctatctttcctaagcttccagttggatgtataagcctatccaatctctgctttgttttttcaatagaagagttatctagggaatatatgttttttgatatactttctaataaactcattttttatcctcccaacatttttttattttttaaactctctttttagataaaaaatactcttattttctaaaaatttcaactttttctttttatttttacatacatataaaaattattctacattttatgttcatttcctttattttacattgtcaatttgcatacaattagatgctttttgtaaaaatatatttaaaagaactttaaggagatgatattgtggatgatttttctaagttaaaaagtttgtatgaagatggatatagatgtatttatcatgattgtgttgataataattatactatctatcttaagaatttttatacggaaggttcagaaaccatagaattaagtagtgaatcagatttctcacaattcaaagattatatagatggactcagaatgtcttaattattatgaaacccattaaaatagggagtttaacaactccctattttgaagtcacaattttttttataagctttaaaagttcgtctctatttacttctctttggttttttctgtctttatactcttgaaagttaacaacttttgtatttggtttttccataaactcacttcccatttaacattattaacttatcttaatatattttattctatacaatttatctatttccttctatttataatacaaaatttcttaaataatcccaaattttcaaaacaaaattttcaaaatatactaaaatctacctttcaaatataatatcaaataaaatttaataatctttatactttatagtataatatactcataaaatataataaaggagattttaaatgaatatattacaaaatgaaaatttaattatcgaatcaagcagttttggtgctgaactaactaaaatattttctaaaaaatacgacaaaaacattctttgggatggtaataaaaaatattggggtagacaatcacctatattgttccctatagtaggtaaactttttgataatgaaacaataatagaagaaaatttatatagcatgactcaacatgggtttgctagagatatggactttgagattgtagataaaggagatacatttgtatcttataaattaacagataatgaatccactttaaagaagtatccatattcttttgagctaatcataaactatacattaaatgataatagtattgaggtagaatggattgtaaaaaatactgactctaaagatatattcttttctataggtggacatcctgcattcaaccttcctttttacaaacaaaatgatttttctaaacactaccttgagtttaaaagtaaaaatgatgtagaaaaaatcaatttaaatggttcttttacagatgatataatacctattggaaaattaaaaaacttacatttaaatccagaagtattcaagaatgatgctttgatatacaccaacatagatgaagtgtctatatataataatgatggtagtaaatatgtaactatatctatggaagatttccctctagttggtatttggactccttattatagtgaaactaattctactgctccttttttatgtatagaaccttggtatggtcttgctgatagtataaattctaacaaaatttataaagataagaagtttattaataaacttagtaagggaaaagtttttactgcttcttacaatataaatatacactagataaaggttagctaacccgttcccaaaataataaaatatttttatataagttaatataagggtatgaaataatattatttaatattcctcaataatattccttaatcaaaaaatattactggaatacaaaattccagtaatatttgataactaaataatgtgtttttatataaaccatagatactttttttatgatttaacaatacatacttatatacgtttttttgattctatttagagcctcatttaatgtttctctaggacaccccacattaatacgaataaatccatctccatctttcacaaaataacttccaactaccatagttaagtttgcatgtctaaaaaattctttagattcttcttcatttctaaatacttctcttacatctatccaggctaaaaaagaagagtctgacttcatcactttggcttttggtatattagtttcaaagaaatcataaactatttcaaaattctcctctacataactagtcatagcatctagccattcttcgctttcattgtatgctgcaactattgctggtattgcaaatacatttggagaagttattgaattactttttagcctttctaataaagtctccctaatttttacatctcttattaatacatatgatgtttttaatccacctaagttgaagcctttattaggagatacgcagattatactatttttataaatttctggatgagcattccacaaagatacaaatctataatctttaaatattatatctctatgaatttcatcacttaccaaaattacattatactttaaacataactctgacacttgatatagttcttcttttgtccatatacgacctgatggattttgtggactacagaatataagtaatcttatattctcgtatttcatttgattttccatatcctctaaatctaaataatatctattgttatctaattttaatgagctacaacacaactttctattattatttgctacagcctctgcaaaagggtcataagcaggtgtatttatcaatacaccctctccttctttagtatatgcttgaactatataatgaagggttgaaacagtaccaaaagttaattttatccaatccttttctatatatacatcaaatcttcttttattccaatttataatagcatcatagaagtcatctcctataaaagtataactataatctcctactgatgctctttttaagatagattcttttatagcaggagcacactcaaaatcgatatcagctaaatccataggaattgcatcttcatttaagccgaatttttctttaatcacatggttgctccattttctacaatttccttctttacgatttaatactttattaaaattatatttcataattttactctcctaatattataaactctttggatgtcttattgagtggaacaccttttccatctattataacaatatcatcttctattctaactccccctacatttggaatataaatacctggctcacaagacattaccattccttccactaatatatcttcactatttggatttaaagtgggaacttcaccatctccaagacctataccatgacccagtccatgattaaaatattcgccaaatccatgtttatctataatttttctagccactttgtcaacatcacttgccctagttccttcctttattgactctattgcagataattgtgcttccaatactacatcatatatctctttaataattttaggaggtttacctatagatattgtacgagtcatgtctgattgatacccttgataaacaacaccaaaatctattgttatagcttcattcactttcaattttttgtttgtaggtcttccatgtggcattgcacctctttctcctgataccactattgtttcaaaagacattccacttgcacctttttttaatgcatgatactgaattagagctgatacttctagctcagtcatatcttttttaatttcagaaataacctcatcaaatacttcatctgtaatctcacaagcctttttaataagttcaatttcttctttagattttatagcccttagcttccataattcatttgttattaaattgatttcaaaaccttcattttttagtgaaagatactcttgtatactcatagcttggttttctattgctaacttttttatatttaattcttttaataactcaattatagttggtatataagaaccttgagatacaatcctttttatgaaaccagtcgtttttttatctgcttcatcaatatatctgccatctagaatttgataatttttatccttagtaacaagcacatatacaccactacctgataaagctcctatatatcttttagtattttttgctttaatcaaaagagcgtcaacacctcttttatagattaaggatactaatctctctattgtattattcataacaaaatattagaaatccaatcctaaatcatccaataagtcttcttcttctttagagaatatattcttagtttcttctttttgttttttattattttgttgacgttccattattttaaagaatggccaatataataaaactgctaatactaattgcaatgcatttgctaatatagaatgccaatctccattagttaaaaatccttctaagaatacccctacatatggagggtcaaatactggctttgctaaccatccccagtgcataaaaaacattggtagtgtacctattatagctccaccaaatacatgtggtataaacattattggatttaatattatcggtgctccaaataatattggttcatttatcccaaataatgcagggaataatgatacacgtccaatcttcttataggaagcattttttgataacatacatgcaattacacaacctatactaattccacatcctgtaaatccaaagaatgcacttgaagctcctgctgtaaagaaatgaggtattgtttctccagcttgcatagctgctatgttttcagctataaatgtaatcattataggtctagttataggactaaatactgatgaatgtattccaaaaaagaatatagtacatatagcaaagttaagtgcaagaactgaccatgggttatccatacttcctactaatggagataaaaattgagtaagtatctgtggaggtaattctccaaatacttttaatgaaataaaacgagcaactataaaagttccacaaactattatagtagtaggtattaattcaaaagacctagatacaaaatcaggtacattttctggcatttttattgtgatattcttcttattacaaaaattatataactccacagaaccaagccctgctatcatacctgtaaatagccctttagctcctaaatttcctatttctaaagctccatctggtgtaaatgaggctactaggaataaaaaagaaaaagttgatagtgcaacacaacctggtatatataatttatagtagttccccagattaaaagcaatacacatacaagcatataatcctattaaacctatggaaagacttactggtaaatccaatattgctgaattgttaagtatgaatttgcttattggattattttctccaagcatatttggaagtgctggaagtattgcaaatatacttcctaatattgtgaatggtgtcatagcaaccataccagcctttatagaaccaaggtgacgttgattgtcaaccttatgagctaaaggcataaatactctattcataaatgcttcaaattttgaaaacatatctaatctcccttttccctcattatttttattatccttgagctaattgatgtttcttataagttattaatgccaacttcataactgtagctccatccatttttccatatacatctttatctattactgcaaaaggcttattttttggctctaatattccttttaagaagtctattttatgagctatttgaggacctataagtactatatcccaatcatcaacttcactttctattgaatctgctggtatagctgtaaactcaaaatctttttcattgagtttagcactctcttttaccacctttttcatattttgcattaacatattagtagaaaatccacctgcacaacataataatattttcataataattcctcctaaagtttgtatttttattatctcttaaaagcatctaaacttttaaaagaatttttacataaataatctatttctacattacaattacttatcgagacaatatatcaaagcctctatcaagtcttttgctagctgagaagtcatatagtggtcttgagcatgtaccattaaaagactcattgttgggctttcaacatcttcatttaaatcttgagttattaattctgtctgtattctgtgagcctcaatatctattttacgagcctcctctattaacaattttgctcctttaaaatcttttgactttactttttttaaagcctcaaaagctttcgatttactctctcctgcagttgatataagctccattatttgtacttctgttgacattttcttattctcctttagataaaatttcttatatgtttatattgttcttcatcaaaatttaaaattaactgtgtatacaatcttataatgttctctaaatctttattacttactattgaaaatgcacaatgaccatatctaactggtacacaagttactacacaaggtttcccttcatttacgagatgtgcttctcctccatcagtcccacctgattcaaacatatcatgttgaagtggtatattatttttatcagcaatttccattacataatctatcatttttctactagggactagagtcctatctctatgcattagcattacacctttatcaatttgtttctgatttgtatagtctctcacaaactcatttttagcacatgctacatctattacaaatactatatctggatttattaactgtgttgatgtctttgctccccttattccaacctcttcactacttgtagccgcaaagtgaatattacaatttagattttctttcctaagttcttttaaaacttctcccatcacaaaacatcctatcctatcatcaaaagcctttcccactaatcggtctggtaaagtaaattcctcaaaacttgttgtatatgttaccatatccccaacattaatccctaggttatatacatcttcttctgtatatgctccaatatctgcatatatattttcagccttaccattattatatgtagcatttatgacagcagggattttctttccttcttttgttgtaattctaactttttgtacaaactgtgcaagaggttttactcctcctattgttattaagtgaatcataccaagtttgtctatacttctcaccataaatccaacttcatccatatgagcacaaatcattacgtttggtgcactctcatcttttattttagaaaagatgatactccctagcccatcacagataattttatcactataagcctttagttcttccaataaaacatgtctaacctcttcttcattagatgctataccatctgcttctgacaacctcttaaaaaactctatattcatgtctaacctcccagatagatttttaacttatacataaactcttcataagattgtgacttatttagcatgtctaccatatccttatttgccataatcttacttaaatatttagatatttgcttatgaagttctaaatttccctttattaatgaaatcatgaaaataattttgggcaccctattttcataaataatatcagtttgtatcaaagctactgatattatatttttgtttcctgtcatctcgattggatgaggtatagccaccccatttgtataaatagtactcaaatagctttctctttcccatacatctttgggataggttggagaacaagctccctcgtcaactatacattttgacatactatcaaggatatccttatacttagctttatcttttatacacctaaagtgattcttatcaaatagacctaatatatattgttttgggcttgatatatttcctatatggtctgcaaatctaacactttctttaatatctaaataatccaattcgtctaaaatttcatttataagtataactggagcatttatttcaaataaaagatttgttattgaaaaaatcaaatctggtgcaaattctattacagctttttcttctagtaatgaaaaatttcttatctcagcatttggaaaaatttctttaagtcttaaatttatcaaaaatgcactacctccaccagaagagcatattattgctattttatattttttattaaaattagcttcttctctcttttcaaaaggaacagcaatgtgagtagctataaaccctatttcatcttgacttatttttatatgatactcattttctatgatttttgaaaattgaatagataaattaaaaacagttggatactgttgacttattttaactgaaaaaggatttattatcttgtggttcttctttatacgttctattaaacatgcaatatgtaagtaaaataagttaaaaaactctttatcttctaaaaaattagagttatattttttatctatctctctaaaaaattcgaacataatatcttgaagtttattcttatcaatattctttatagtggctttcttatctttagtctttagttttataagctcctttaaataatacttttcatcataattaaggttatattttttatctctaaaaattttatctaataatttatctataattaaatcttctgtatataattttaaattgctagcatttcccactactctcatactaactcttatatacaatataataatttgtgctaatatttcctcaagttctgttaaatttgcttctaaatcatgttcattaagtacattttttattgtacttctaatattagctaattttaaattatctataaacttattcctgtactctgttatatttctattccctctaaaataactatccaccaatatactttgaatttctttaatagaaccttctattttaattccataatgagcctttcgctctagttttaattctgtatcctttatcttttcatctatcttttttaaatcattttttatttgggatgaacttactagaaattttttacttaactgttctatagttttataaccttcatttactaaaagctctactattatagactccaaccgttgttctggattttcaactaaatctgagggtaagtttcttagataatgctcgaatttatcttggtctttaatatttagaatatatcctaatttagacttatattctaatttaaaaccattacattcttttatagtttctatcttttttatttcatttctgatagttcgagtagatacccccaacttatctgcaaaataatctatgtttagataaccactactattttttaatgtttcaagaataatgcgttctctcatatccccacctccctcagtgttattattgtgttttttaaagtggtataaaaaatattttttataaaaacaaccttttctttttatttaagaattttatatcctagtatattttgattccaaaatttaatatacatattttataataataaaatatatagttcaatttttattatattttaattatatatgtaatactttaccaataaaagctgatatttttcatcaattaaatgaaaaaaatacaccatttacatataattaatataaatttttcatataacaaatatcctaaacttatctaaaataaatttaggatattttatttttatactctatttacagacccacacactttaatcttttcttttacaaaatccttcactgattgaagccctgctaatccatactttttagggtctataacctcagaatcttcatctaaaacttttttaacccctttactatatgcaattcttaattcagttgcatagttaacttttgcaatacctctttttatagcttcttttataatatcatcatgtattcctgaacctccatgcaatactaaaggtattgaaactacatttttaatttctgataacctatctaaatctattttaggttcacccttatacaatccatgtgcagtacctatagcaatagccaatgaagatattcctgttctatcgacaaactcttttgcctcttttggatttgtataatcattactattcccgccatctaaatcatcttcttttccaccaactttcccaagttctgcttccactggtataagagaaggactacatgcttttactactgatttagatatagatatattattttcaaagctttcatgagaaccatctatcattattgatgtatatccacttcttaaagctttcattgcaaggtcaaaacttgaaccatggtccagatgcattgctacaggtatctttactctttctgcagcaacctttgcatttgctagataataatcaagacctgcatattttacagtagatggagtagtttgtaatattactggagagtttaactcctcagctgcttctataacagcaattaccatttccatattttctacattaaatgctcctactgcatacccctcatcttgtgcctttttaagcattgatgttgttgttactaatgccacattgataccctcccaaattatttagttataatattttaatcttatcttttaatattcatatattgttacaccttttactactctatttactgttcctgtagctgatggcgtatctggcttatttccaacctttaccgatacaaacaatgctatagtttgtgcaaacaatatgtatggcattgcaagatacacatctggtaatttattatacttttctttaaactcaaactttgttcctgagaagttattttcattttctactgacactgcacaagtgaatttagcaattttatccctttttatctcctctaaaacatctaaatcatattttcttgtatataaacagttagatacaaattcaaatacaagtgtattttcatcaataaatgattttggtccgtgtctaaaccccataggagaatcatacaccgtagatatttttcctgctgtaagttctaaaagttttagttgtgcttcttgtgtcaaaccacctaatcctcctgaacctaaatatacaactctatcgaaatctttatttattaactcatgtatttcatcttttctatctataacatttcttcccatttcaattattgcatttatatatgacttttctacatcatcttctaaactatcgaatattaacatagcagataacatcatacacgaaaaacttcctgtcatagcaaagccttcatcatttgattttgatggcattaataacaagtaattattttcgtcgtttttagtcattttagctagttctccttgcggattacaagttatagctaaatgataaaaattatctacaatcttattccctaaatttaaagcagccaaactttcaggactatttccacttcttgcaaatgaaattaataatgttggtatatctttttttaagtaatcatatgggtttgaaactatatccgtagtaggtattgcttcaaatatgtattttcttatgtcatttttattcttaaggtaaggaagtattgaatttcctatgtaagctgaagttccagcacctgtaaatataactctaaactgcccatgattattacttattgtatctatgaatctatttaatttttctttgttagatttatatatttcataagtctctaaccataactcaggttgttgttttatttcattagttgttattattgcacctaaatcttttagtttttgttcttctaatttaaacattttcattctcctttcatacttgtaacgtttacatttggtaatgaggttataaccactttaaactataaaaaaatatactcttttataattttttgcttagattttttagtactacttaaactcactataaaatatacgctatagattttaattaattttatagtttatctttaaaaatttaataaaatcatactttagtatttttattttacgataaaaacttgttcagaccaaagtggtaattaccactaatccaaatataaattaatttgaattttttgtcaatacataaaatatttatatcaatcaattttatagatatcctacaaaattactttgtcaatatttcttatttcgttaatttacttatataagctttaaatttattttttgatacaaagtttacaaatttatgtgtctgaattataatcaattctgtaaatataaaaaccttaggagaaagtattatgaaaaatataaaaatgggaatgataggtcttggctccatagctcaaaaggcatatttacctatattaactaagtctgagagatttgagtttgtaggagcttttactccaaataaagttaaaagggaaaaaatctgtagtgattatagaattatgccattcgattctattgaatccctagctaaaaaatgtgattgtatttttctacatagctctacagaaacacactacgaaattataaaaatattattaaatttaggtgttcatgtatatgtagacaaacctcttgcttcaacagtaaatcaaggagaagaacttatcgagttaagtaagaaaaaaaacttaaatttaatggttggattcaaccgtagattctgtcctatgtacaaagaaattaaaaataatgctacagaaatcgtatctatcaatatatgtaaacatggattaaattccttaagaaatgttagattcgacagtacccttatagatgactatatacatgttattgacactgctttatggttagcaaatgaagatgttgaaattagcggagaagatttatttttaacagacaataagaatcttatatttgtaagtcataaacttaaaggtaaacatttctctgtaaacacctctatgcatagagattctggaacaaagttagaacaagttgaaattctttcaaaaggtaagattcaaagagttaagaatcttaatgtactggaaatagaagaaggtggaaacctaactttaaaacaaagtggtgcatgggtaaatatattaaaacaaaagggttttgaggatatatcaaatcattttattgattgtatagaaaataatataaaaccagctattaatggagaagagtgtatcaaggctcaaagattactagagaaaattataaattcagtaaaatagatatttattataaaaataggttaaaaatgaatttttctaacctatttttatataagactatatcttttatattaaaattaaaatctattacaacaacattaaatttattatattcccattaaatttatttaacttaacttttttacttcaactaaatcttgatatttatcaatttctcccaaatctacaaatccagtttccatatttaaagcattacttataccgcaagcatttgcaaatttaagtaaattttctattttataaccccttaaaatacctacactaaatccagccactgtgctatctccactacctacagtatttatacactttacaactggtacttttacatcatatacattatattcgtttaaatacaccataccatcttttcctaaagatatacatacattctctgcacccatttcaataagtttttttcctgacaagataatttcctctcttgattctatatttattcctaataaatgtcttatttcatctatatttggctttattaaatatggttttgattttaaagctatttttaatgcttctcctgatgtatctaatataaattttatattatttgctctacatatatttcctatcttttcataataatctatcggcatattctcacaataactaccagaagctactagtattttagtattttttagtacttcctctatatcattttcaaatctctctaaatcgcttttttctactattggtcctttttctaaaaattctgtactaactttattgtcctcaattatgtttaagcaatttctagtttcctgctctatttttgtaaatttattttgtatatctagttttctaagttcattttttataaattctccattaaatccacctagaaatcccatagctaaaggattttcttttaaaattttacataccttagctacgtttaatcctttacctccagcagttgcattcttacttactaccctttgcacctcacctatgtttatattattcactttatacattctatctatagatgggttgaatgttattactgtaatcatactagattctcctcattattaatttttacttttctaaacaataaattaatctgtaaaataaaaaatacctcatctataatatacccaaagtggttattaccaatttgaatataaattattttacttgttttgtcaatataccataattttataataaattaatagccttacttattgaattttgattaaactttattcattgacataaataattctatattctataatcaaattgtggtaataaccacttagaaaggactatgtttttatgataaaaagaaatgataaaagaccaatatatgaccagcttgttgagatattaagaactaagattgaaaatgagatggaaccaaacgatagaatgctttctgaaagaaaaatttgtgatgaatatggagtaagtagaaccacagttagactagctatggctgagttggaacatatgggatatatatacaaaagacatggaaaaggaacttttgttgctgcactaagtcaaaattctcaaaacttaatggaaagttatagctttacagattatatgagaatacaaggaaaaaagccaggtacaaaggtattatcatttgaggtagtagaaagtacaaagtatttctctgaaaaattaggtataactcctggtgaaaaaatgataaaaataatgcgtttaagacttgctgatgaccttcctatgatgcttgaaagaacatatcttcctatgaaagaatttataggattgacaaaagaaaaaatcgaacaaaaacctttatatgaaatatttagagaagattatggcgagattattaaagttgctgatgaagaattttcagctggaataatctctgataaggaagctaagttattggaagtaccaggagattcaccttgtctgaaattacttcgtaccacatataatgatgacaatatagttattgaatttactttgagtgttgctagaagcgataaatttgtatatagagtaagacatgtaagatagtgaattaaatagctttcaagaaaatagaatgatattataaacgtcaatgccacaatgatagtataattataaggaggttattttgaaaagttttatttatgcagataaattttttatgaaacatggaatcaaagaaaaaggttaccttagtataattaatggcaaattcggtgaatttcaacaagaaagacctaatattactgataatgtcatagatttttcaggtaaatatattgctcctggcttagttgatactcacattcacggtcttttaggtgcagatgtcatggacaatacatttgaagcaataaacacaatttcaaaaggcttattaaaatatggagtaacatctttcctacctacaactttaactgattctgtagatacactaagtgattctgtagaaaatataagcaatagcttcaatcgagttgagggtgcaaaaatacaagggatttatttagaaggtccattttttacagaaaaatataagggcgctcaaaatgaaaaatattttaaagaccctgacatcaatatattaaaattatggcaaagaaaatcgaaaaatttaataagaaaaatagcaattgctccagaacgtaaaggttcaatagaattaacaagatatgcaactaaaaataatatctctgtttctcttggccatagttcagctacatttgaacaagttaaacaagtcgttaattcaggtgctaaagtgtttgtacatacatataatgggatgagccctttaaatcatagagaacctggaatggttggggctgctatggtactaaaagatacttatgctgaattaatttgtgatggtcatcatgtaagcccaatagctgttaaaataatgatggatgcgaagtctagtaataacatagctttaattacagattgtatgagggctggtgctatggaggatggaaaatatactcttggtaagtttagtgtaaatgtaaaaaatagtgttgcaagattaaatagtgggagtttagctggaagtgtattaactatggacaaggctgtgagaaatatagttgattggaacatagccactttagaagatgcaataaaaatggctacatatgttcctgctttaagttgtaatattgataatgtctgtggctccatacatcaaggtatggatgcagactttatagtaacagataagaactttaatatatacgaaacttatataagtggtatatgtatgtacaaagttaataaatagattcaatataaagttatggaggcttcctaaaaatagagataagtctctttttcattgttaaaatgatgaaaatacatttgatttcatacaaaaagagtgcctcataaactaaaaagttaattttgagacactccttttattaaggttctttattttacaatataagtttataaaattaagaatctggaaatatttatgtgtattctttgaataaaaatttattttttagtgataattaaacatttattggtaaggctatggctttaaaaatcatagccttattttgatattttttccatttttgtaaaaattattacccctttaagaaaattccttaatttttttgaaatatttctttattaatttagagttaaaattctttcttcaaaataaatacttaaatgagctaagatttgagtccaatttctaatcttttgagtccatctttcagaaatatccatagttgctaagtataatgatttgtgcaaagaatcatctaaaggaaaaatagacttcgatttagtaacttttcttaataatctattgtaactttccattgaatttgtagtatatatcaatgttcttatctcttgaggatatttaaagtatgttgctagctcatttcaattgcttcgccaacttcttaatgctatcgcatattgattaccccatttttcctctaagagcgatagctcacttaatgctacttcctctgtaattgcagcatatactttcttttaatcttttgcacattcttttctatttttatatgatacataatttaaagtatttctaatttgatgtacaacacatctttgtatttcagtatcaggaaatactgctttaattgcatcagaaaatccaactaatccatctacagaagttattaatatatccttaactcctctgtttttgacatctgtaagcacctttagccaatactttgaactttcattttctccaatccatattcctaagacctcctttataccttctaagttaacacctatggctatatatgcagctttgtttattattctaccttcacttctaactttataatgtatagcatccataaatacaattggataaaccatatcaagaggtctgttttgccattcatgagctaaaggtagaactctatcagtaattttagctactagagaatgagatatatcaattccgtaaatactcttaaggtggcttgatatatctcgagtagacatgccttttgagtacattccaatcacttggttctctattcctgatatatcatttttataattactaattacctttggttcaaaatctccatttcggtctcttggaatatttaaagttatttctccaaaatctgatttaacatttttatttctatatccatttctagagtttttagtatttttattcttattgccatatctatcataacctaaatggtcgtcaagctccgcttctaacatttgatgaattgtactcgcaaataaatcttttagcatatcttgaatatctgtagttgttttaacatcatattcttcaataagtttttttaatatttcgtttttgttaaacataaaaagtgtgcaccttcctttatatagtgatatttaatattttaattatcaccactttttagaagaatacacactttattttaaagacccatttattgtaaagataaagcatggtctaaaatttcaaattttagaccataatcttatgtttttagataggcctaaaatatttagattagaaaataatcaattttaagacatccctattttatttataattatgtacattttacactatcagttaattagaattatttttattcatatttaaactattcaaattgttttcccaattttttatctccttcttaatgtcttcacttaaagtatcacttgaagacactttctttaatttatcattcaaagatttcttttgttcttctgaaagatctgtttttattgtaggatcaataatatctattacatcttttatatcaaaatcaacaaatttgcataattcatctaaatgatcaattaagaattctatatattcatatgaccattctttataattttttttgttttttaacatgaactcattaatttcataactttgatttgctaattcaaagaatgaacctgaaggatccattatgtcatttatagagttttcatagttaacaatattaatttgtcttattaatttctctttttctgttaagttactataatttttgttaacaaaagcaactaatccaaattcaaaatttaaaattgaatctttacgctgttttactgaatcttctccaaattctctaagaccttctaaatttttatcaatagccttatctctaatttttgttaattgttctatacttaaagcttctaagtttttaggcactatttcttcattatttttagcaatttcttttgatttatcatttgtatttctattattgaaaacaaatatagcagtgaataaacttaaaactattactaaaacaattaaacttacattttttttgtttaacatatcaaatctcctttttaataagtattttatttgtgaaaaaataactcagtttattagaataacctttattactgattattctaaagaatacaatagaacacttttttgatatagtttatataattataacgaatgataaactaatttttagacaaatttatataattcttttattaaatttttaaatcataaaaaagagactaaattccactagtctcttttttatgattatgtaataaaatttaatagctgcttcaactaaatacttattggatcttgaaatagatatttattcttttcaattttcatttaattaaaagtataaatttttatttattcccaataaactttgtaataagaaattttctttccttcaagtttttttaacaaatttgttcttgcaccttcatctgaatgtgcagcatatgaaaaattatatccatttgaatgcttatctgtagatattagtgtatgagttgctactccactactatttaatatacttacaggtgttgctggtcttaaaaaacttaaagagtttgatacagtaagtgtttgatatgcaattcgattcatccaatgtattttaaattctcttgctccagcccaagaaggtgatctattactagtagaataataataccatggattattattcgtccagaatgttactccagcttcatgtaagcattgtgaaacaaagttagcacaatctccatatccatctttttgaaaattataatatggagaaggtgcattattttttctatttgtactaccataataaccattagtatagccatgttttttagcataagctaatgcttgttgtctataactagaagggcttactcttggtaaaggttcatttgaatttttctcattaatatttaaattattttcccagttttctatttcatcttttatatttgtacttagagtattacttgaatacatttttattaattcattatttagagatttcttttgattatctgaaagatctggttttattgaaggatcaaccatttctattacatattttgcatcaaaatctacaaaattacataaatcctctaaatgctcaatcaaaaactctacatattcatacgaccactctttatagttttttccattttttaatacaaattcattaatctgataactttggtttgttactttgaaaaaatcgcctgaaggatccattatatcatttatagaattttcatactcaacaatattgatttgtcttattaatttctctttttctgttaagttactataatttttgttaacaaaagctactaatccaaattcaaagtttaaaattgaatctttacgttctttcactgaatcttctccaaattttctaagaccttctaaatttttatcaatagctttatctctaatatctattaattgttctatacttaaatcttctaagtttttagagaccatttcttcattatatttggttacatcttgtcctttcacattagtattttcatcagcgaaaacaaatacagtagttgataagcttaaaatcattgtcataataattgaacttatattttttttatttaacatattaaacctccctctttaatatatgtattaatacttgccaaaacaaaaatcatattctactaaaatttaaaacaagtttatcaccgtttttttctaaaagagcgtttactaaatatcataatataatcctccctttctagtattatttatatatataacgaataaagaatcgttttttagacacttatatataaatttttttattaattatcaagaattaatttttaagtaagatttaattatcaagagtagaatcataatatataaaataaacaatcaaaaatagtgtaaaaactaatactttttgttaatattaatagataaagataaactaaggtggtgattaaactgacaatagaagaatacaaaaataaatactctactggagataaaattatactttccttaaagagttttgataataaagaactatactatcatgaaactgataacatattaaattcaaaagatgaaatagatagattaacatcaagcaagatatttaaaataatagaagataaaaatgatttagccttagagtcttattattctagtgtaatagaaggtgccttttcaactagaaagattgcaaaatctataattagaggaaagatgaaaccaagtaataaaagtgagtatatgatttacaataatcatagagccttagaatatggattagataatttagataaattatatagtcacaaatttatatataatttacatcatatattgggtgaaaactgtttagattcagaagaatatgaatatagaactgaaaaagtatatgtatgtgattcaaaaggtgagattatacatacaggacttgatcctttgaaaatatataattttatggatgaattaataatttttatggaaaatagtaaagtaaatgatttagtaaagagtacaataattcatttctactttgtatatgttcatccttttagtgatggtaatggaagaacatcaagagccttatcatatctatatttaattaataaaggatatgatacttttaaagagttttcaatatcatatataatatctaaaaacagaactaagtattataaggctatactagatgtagagaataaaggatataatttaactgtatttatagagttcatgctaaagtctataatacaatctatcaatgaaatgcgtgatatgcatgataggaagtctttagagagtatattaaaagaggaattatttgaaaatgatataactctatcagcaacagaagaacatatattaaaatatatctgtagtaaagataattattctatgacattagagaactatatcaaaaagaataaaggtagatacttaaaggctggaataaaagaaatcgaattagttgaccagttgatggaagtgtttaataatcttgaagaaatagagattttatctagagaaaaggatgtatataaagttaatgagaagtacttgaatatgcttgaaataagttaaattgaagcatataaaaataaaaagtatataaagttatataatataataataagccctctatgaatcgctcttaattgagttttcttagagggttaaatttttcattcttaaaataaaaagatttttattttgtccaaaattacttttattattcgttatatatataaataatcttataaggaggtctaaattatatgatattaaataaaactattatgaaataagacaaggtttgattgtgaagttatataaaaagattatttttaatataactaacaggttatatgacagtgtttatagaataaatatttaagtaaaggtagtaaaatattatgttaaagaaaaaaataataagttttttaatggcaggaatatttgttttatctagtggatataatttggtttatgcatctacttttgaagaaaatgaatataaacaagaacttgttaatgaaaacgaatttactattattaatagcaatgaaaatgaaatgattgtggataaaaaaggcaataacacttatgtttcaacaaaagttacacctggtagttggaaaaatgttaaatatctaggtcaaaaatcacgcaaattaagttctccttatacaagagaaagaattatacaaactattcaatggggattaggttatctttctggagggtcatcttttttattaggtttagctgagagtatttatagagaaaaagtatatgacattactaaatatggaggcgtatatacaaaaacatactataggagacaaataactgatattagaaacagtcatgctaatgttcctgttccatacagatatgaatatgttacatatttttatagctcatctaactttaaaaaagttgtatatactgaaagagtaggagatggtataaaactagcaaataactaggaggaaatatatgaataataagaaaaaatcattcttgatttctggcactataaacgtaattttattaatcattgtttttgcattgtttagttataatattatagaaaatagtacacgaaatatgataataactgtaattttaatttttatttttgaaattataaaaataaagatactagagaaatattataatctataaacaagaaatatctttcctaagagcatattgtaaagtatgctggtacaaatttacattacaaactatctattctgatgtaaaaataaaatcaaaactccaattaatttacaaaaagcatggcaaatctttaactctagttttacatttatgctataatattatttatagagtaaacataggtggaggtatcaaagatggtagtaggttatatgagagtttcaacagcagaacaaaatgaagatagacaattagttacaatgaaaaagcataatgtagaaaaaatgtatcaggagaaaataagtgccaaagatactaaaagatcaaaactaaacgcaatgttagattttgtaagagaaggagatacaataattgtacatgactttagtagacttgctagaagtactaaagacttattagaaatagttgagctcttagaaaagaaacatgtaaagttaattagtgataaagaaaatttagatacaagtacacctacaggaaaacttatgcttacaatgcttggcgcaatatatgaatttgagagaacaaacatgttagaaagacaacgagaaggtatctctatagctaaagaacagggtaaatataaaggacgtaaagaagttaagatagacaactttggtagttattatgatagatataaaactagagaacttaataagactcaattggctaaagaattgggagtaagtagaccaacattagatagattaataaagagccatgagagtaactaagaagagcaatatatatgcttaagttaattttagtggggcaaattcatagaattatgccctttaattatgtttaaaataattataaataactgtttttcagtatagggggtatccttctatttcaaaaaagtattatttatagaaaatgagttctagaaattttctagcaaaaattaaaaaccagagacatatttcaaagagggtgattttattagaaaaaaatttgcattgtttattttattaattgtattactcactgaacctaaaaaaatagaagaattaagaggaagtaaatacgagtggataatttagaaagaaatatacaattaatatttagttatatggcaaagacctttataagaaatggagcaactataagagaagctgaaaaagaagcaaatgagattataaaaactaattcaagcaatctttggggagttaatggcctagcttatcagcttggaaaaataaatttagaatttttctgtatgtattttatacaagacacatatttaccaaaagaagataatgttgctgctcctatagctaaagttcatcatgagttatgggaagatatacaagagtctataattggagatggttcacagcaattaggaagaatttatccaagaggaacaggtaaaagtgcatttggagatttagcaacaactgtatggtcacattgttataaacataagacatatactttaatttgctctgatataggctctacagcagaaaaattcgtaaaagatataaaaaatgcattacttgaaaatgagtatattaaaaaagcatttggagttctcttaaatgataatgatagaaaatatatttgcaatagtactcaattagaattaactaataaaacctttattgaagcaatatcatcttcatcaccaatgagaggaaaaaaatacaataataatcgtccagatcttatcatacttgatgattatcagtcagaagaaaatgttagaacagaagatgctagagagaaaaaatttaaaaaattttctgatgatgtaaaatatgctgcttaaaaaccagtaataagaaatggtaagattataaaaagaggaacaacttttatagcattaggaaccttacaacataaagaatgtttctatagtaggctaaagaatttaccaacttggaaatttaaatgtgaaaaaggagttttagttgataatgtagatgaattatttaattctggtttatggcttaatttcaaagagttgttatttgatttcaaaaacacaaatcatcttgaagatgctaaagaattttactgggaaaatgaaaaagaaattaaatttcctatattatggccaagtttttggaattgtttagacatggctttaagttattacgaaaacccaacatcttttaaacaagaggtacaaaatgatgtaaattcaataggtgagaaatggtttaaaacaatcagaacttaatctagagaatgtatagaaactcatacattcaaaaagacaatgttattatgtgacccagcatctgcaggtggttctaaacatgactatagtgcttttcttgttggaagtgaatcagaaaatggtttactatgtggcagattggcagaactagccaaaataaatgctagaactgattttgataaatatatattgcatatgatttatttattaaaagtgtatccagatataacacatgtttatatagaaaaaaatacatttaatggtacagctgctaatcaattagaacttaaaataaaaaatgatgatgttctttactacagagatatagaaatcattaatgagcaccaaaagaaaaataaagatgataaaatctctactttaatacctgttttaaataaaggtcaaatgatttttgcagaagaggataaggcatttatacagcaaatccttaattttacaggacaaaagtactctctacatgatgatgcaccagatatatcagcagaatttataaataggatttttaatattaaagtaaatgaaagtattacactattagatagaagaaatttaggtctttgattgtatggaggtgatgcattaaatggaaatagatttaagtttattaagagaaatatatgaagactagagtttaaaaaagcaagaatacaacactatgtataagtattataaaggtgaaacagatgctattagtaactataaaatggttaccaagaggtctaataataagataaacactaatttcttaaaaaagtttattaatgaagaggtcgcttattctcttgcaaataaaatcacctatacaagtagattaggtgatgagaagattataaatgatttagaatactatacttgccattggagtaaaaagcacgattcagatttattgagatatacactattatttggattttgctatgaactttactatgtaaaaaacaatgaaatgaaagtaagaataataaaaccaacagatggctgccattatgaaaatgaagatggagagaccatctatttttttagagaatttaaaaaagattttaaagatgatatttatatagatgtatatgataaagaatacatatatcattttgattcaaattttaaagagatagaaaaacctacagtaaataatatatttaatggtaatgttccaatatcaatttgtaaaagaagtgaagaactaggaaaaaatacaatattcaatgatataaaaggattacaagatgcttatgaaactaatttaagtgatataagtaatgaaattagtgattttagaaatgcttatttaaccttctctgaatgtaatattaaagaagatgatttgccaaggatgaaagaacttggaatacttcaagttaatggagatggaaaaatagaatggcttattaaagacatgaatgatacatttgttcaaaatacactatcttcaataaaagaaaacatatataaaattacatctcatataaatcacaatgaaaaaatgcaaagtaatacatcaagtttagcagttgtagcaagattaatcagtacagaatggatttgtagccagaataatgatagtattgcagatactttatttaataggtacaaattattgtgcatttggcttaataaaaaatatggttttgactatgattataaagatattaaggctaaatttacccctaagataccacataatgatttagttgtagcaaatatattaagtcaacttggagataaattatctactgaaaccggattatctcaaccaagttttattgataatcctcatgcagaaatggaaaaggctaaaaaagaacaggaaatagtttcagagggagagattttattagatgaatcaaaagattataactaaattgactgaagatatatataaatctgctgaaaatagaggtgcaaaatcggacgtaagggaattgtattggcttagtcatacaaaagctccagcgatattaattgaagtatgttttgtagacagtaaagcagatacagactattaaagacatagttgctaaattaatagcagaaggtattttgaataaaactatagataatagcgagggaaaaatcatgtataaacatacaatcatttatgatggagaagctgatatgatacctgcaactgtgattggttggggttataatgatgggaaaatactgatatgtgatataaaagattatataccaggtcaaacagaaaatttatatataaattatgtttcattttctataataacttattttataaaatagagtgccaatataaaaaagtataaatattatacacctattttatattggcactctatttaaaattaattatatttgcttttaaaaaactattattcttgtttactacaactcataaatacaatatctatttttaatatttctttgtactacttattatatttttactttcagagttagcttttattgtggaatgaactctgtaatatccttttcctatagtttttgacttagaaagagaacatgaaatatttcctgaagcattccatgtttggattgttgaccatgttttcccattatcattgcttttctgtaatctagcaataattgatgtgcttgtaacatttgatgctcctctaacaaagcatgttactttagctgtacttcctgaaatacttaaattgcaagtaccagacttaatataagacattttcaccatagtatcatctatatagtttactgctgaatattgttcaatattcttatcttgatattcatcagcaaatgcaggtattgcaactgctgatgaacatactaaagcacacataccacttataactgtttttctaagattcataaaatcacctcttcatttgttttctatttatataacttatataacgaatgaagaagtgatttttggacactaatgataattttttttattataattttaaattatacattttctttataatagaatgtctttaactataatagttatgaatatctgtaaataatatgtattgtgactatcccccaataaattcatgatttttattttacttataatattaaattgtaaacatctgaactagaccagattttactactaagactccgcctcctgttgtacttgtacctttcaatatagctttataatccccttttttaagatatttaacatctatttgtccagatatagttgaagatcctccaccacttattggatatgatgctacaagcatattttttgaatttctaatctcaacagttcctgaaaatagtataactattccttttgaagatgttatcctccaattaagatgtttacttgacatataacctatatatgcagttcctccactaccatgtgtatatgctttttcattactttgaaacactaatggcgcctcagcataaattgaatcattttcagctttttcattagcaaatactaaagttgatggtaatataactaaacttaaagtaagtaataacgcaaataatcttttcatgtgtattcccccagttttaaattaattttcgaatatcaaaggtttatcgctttccctcgatttaatgacaacatcataattatgtttagcaatatcaattgcacttaaaaaaggtgcaagtacactttcaataagagacatttcttcatacagtatatatccttttcctgcatagaaattagttaatttctcaatatttattttgcatagaatagatattgtttctaacgagaatttataatcgtctataagaaaacttaaatcttccataaatttttctagaacttcgttgtctctatacaatttattacttttacataaatataaatctgatttcattttttacacctcaattttaaagttttattcctattgcaagcatgttataactataatgtattaatttttcctataacaatatttttaacgctcaggtaaatgtagattttaaaaccataaaaatcacctcacattttcatatatacttgtataacgaatgaagaggctacccttggacacttaaaaaaattattttatacttttcgctatttttatcaaaatatcttcataaaattcagattctccactattttgataatctacatttaataaatatataaagttgttgtcattccaaaataactgtaagaaagttccttttactatatattttgctttatgcccatttacaaatatatctttaacttttgcattttctgtatctaatataatagaatttgaactaattttatctgttacatattgtatctcaatattttcatcatttctatatgtaataacaaaatcatcaactctatcaacttctttaaatccttttggtatatactcaggttctttattttttaaactaagattatcttctccattagttgaaaaaacaaatgaagttaagtcttcatatactcttattactaatctaaagaaacgtgaacgcaatgcctcactactcatagtaatagtaagtaaactagctaaaactattaaaaatacaatagctgtttgttttgaataaaaaatgattttatttgtaagactacttcttttttgttgcttaatgagttttttcatttttcgctcaaaaccttttgaaaaaacatgatttaattcatcatctgaaagaaggtcatcaataataatttttgtcgctattgggatactttctctaagcatatcatccgtaatatcaaaatcatcttttttattactcaatatttccaacctccatttcttctaatatttcttttaatttttttctagcacgctgaattctcttatatacattttcctcccctaaatttaatgcatttgctatttctttatttgaaaaaccatactggaactttaaggaaagcacttgaaagtaactttcattaagttttgcaagtgctatagctaaattactttcacatactttatcttctatagaaaaatttatctccctgtttttatactcttcttcaatatcagataccttttctctttttctctttctgtaaaagtctatagcaatcctttctactattataacgataaaagccttcgttcttggactgtctacctcatcaattttatctatatttttaattattcttaaaaaagcattatgtactgcatcttctgataaatgatcatcctttaatattttattggctacataaaacattatttgtctatacttttcatataccttttcaaactttattttatcttcttcgagttcaagtatagctagataaattaacatttagaattcctccaatataaaaattctgaattaatattttaaagttcaattataacataaatatataattaactctacttaaatagaatataactatgcttaacaagctttttaaagatatctagtaaaaaggcccttcaaatccattttcgggattataagggccttaactctacaaatgattctcaaagttaaatttttaaattaattattttcgtatatatctaattccataaaaattaatctttttttgttttgatgtaatagtatataaacaaaagtacatatgctaaaggtattaaaagcaatatttttaaatcaatatcaaatgtattagtataaaatgataatgcaagtgataatatcacaattatcaggtttggaattgtttttaaaaaaaccttataaagcctttttttcatattattcctcctaaaaaagcatgtcttttaagtttgatagaaccaatgatcatatctataagtatatgttgcaccctgaaaattccacttatcctctatatatgataaaacaatcccataattagtatttataccatccatgttaattgttattatctttccaattgccactacatcaagctctacccaaatttttggtaaaaaacctccaaaagtagatgcaagatctgttccagcttttattttctttaatgtctttccacttacataaatatataaatagtttttaccatttttagtaaaagttctgtatttgttatacccatttatatatttcacacgagaattttgatttactttcttagcagaatcgtccacttcttgattgattttatccaattccttttgagtaaattgacctgttttaattaagatctcatcaatcttttcatctgaaaaaattttatcctcaggccagtaattatgtaattcctctacttctttgtcagacaactctattttcacattattatctgattctgttttttccattgcatttgctgtaacagcaagtggtaaagatattatcacagctgccatcactgttgataaaaggagattaattcttttgatattcatttaaatccccctaactataataaatttaaggttttaaaattaaccctttacatatataacatatttaattttgttttttggacacaagttttaaaaaatttatatttttaaaacttatgaaaatataacaaaagatacttgatttgagagaagtgtttttaatattattatatttcaaacttaacgcagttaaggttttgtaattatttatatttgttatttataaaattaattttaatatagttcagtttttaattgacttcatacaaaatagaatataacttatacaataagtgagtctggaaatatttatgtgtattctttgaataaaaatttatttttttagtgataattaaacatttattggtaaggctatggctttaaaaatcatagccttattttgatattttttccatttttgtaaaaattattatccctttaagaaaatttcttaatttttttgaaatatttctttattaatttagagttaaaattctttcttcaaaataaatacttaaatgagctaagatttgagtccaatttctaatcttttgagtccatctttcagaaatatccatagttgctaagtataatgatttgtgcaaagaatcatctgaaggaaaaatagacttcgatttagtaacttttcttaataatctattgtaactttccattgaatttgtagtatatatcaatgttcttatctcttgaggatatttaaagtatgttgctagctcattccaattacttcgccaacttcttaatgctatcgcatattgattaccccatttttcctctaagagcgatagctcacttaatgctacttcctctgtaattgcagcatatactttctttaaatcttttgcaaattcttttctatttttatatgatacataatttaaagtatttctaatttgatgtacaacacatctttgtatttcagtatcaggaaatactgctttaattgcatcagaaaatccaactaatccatctacagaagttattaatatatccttaactcctctgtttttgacatctgtaagcacctttagccaatactttgaactttcattttctccaatccatattcctaagacctccgttataccttctaagttaacacctatggctatatatgcagctttgtttattattctaccttcacttctaactttataatgtatagcacccataaatacaattggataaaccatatcaagagctctgctttgccattcatgagctaaaggtagaactctatcagtaattttagctattagagaatgagatatatcaattccgtaaatactcttaaggtggcttgatatatctcgagtagacataccttttgagtacattccaatcacttggttctctattcctgatatatcattttcataatttctaattacctttggttcaaaatctccatttcgatctcttggaatatttaaagttatttctccaaaatctgatttaacatttttatttctatatctatttctagagtttttagtatttttattcttattgtcatatctatcataacctaaatggtcgtcaagctccgcttctaacatttgatgaattgtacttgcaaataaatcttttagcatatcttgaatatctgtagttgttttaacatcatattcttcaataagtttttttaatatttcgtttttgttaaacataaaaagtgtgcaccttccttatatatagtgatatttaatattttaattatcactactttttagaagaatacacactttattttaaagacccacaaaagagtgcctcataaactaaaaagttaattttgagacactccttttattaaggttctttattttacaatataagtttataaaaattaaactttatttatcaatctgttctctaagccatttagtcgctacatctaactgtttattttcatctttttcttcaatagtaggctttatgcctttttcattgatataatctccattaggtgtaaaatattgagcagtagttaacttgtatcctgttccatccttcaatcttacaactgattgtaccaaccctttaccaaaagttgtagtccctacagaaataccttctttattatcaacgattgcagctgttaatatttcagcagcagaagcactttctccattagttaacactactattggaagtcccaatttttctttatcagatttcaagtactcagtatttcccttattatcttttgtatatactatagttccttcaccaattaactcatcagcaacttctttacatatatctagcattccaccaggattatttctaaggtctattactaatcccttgatattttttgcttttaattcttttaaagctttatcaaagtcagtatatgtacttgatataaattgggtaatttctatatatcctaaatcattatcaattactttactttctatactcttctcaattatctggtctgtttttactttaaagttcaattgtttatcttctcttaatatagtcagttcaactgttttcccttttttacccttcatcatacgaacagcttcatctgaatttttatatgagacagattttccattgacttttactaatttatcccctgattttacacctgctttctctgctggagaatctttcatgggaactactactaagccaccatcttttgatgcccctatatacatacctacaccaacataagaaccttcactatcattaattagattctccatttcatctttagtataataaccagaatacttatcatttgttcctagaaatagaccttttgctgctccatttaccaaatcagtatctgatacttttttataaaaatcttgttttataatagattctagtcctaacaacttatcatattttttatagtcttcatagagttctttcgatattacaactttattccccaatgtcaactgaaatgctgatgtaaccatagctgttataattactaaaatcacccctaaaaaaatagctttcttctttgaaatcacaagatacatctccttttacataaactattattattatatgactagctgttatttttattacatttacccaaatatattgctttattacaataaattatactaaaatttatattaaatacaattgctgtacacattataacatattaagggaggaattattttatgaaaaaagaatttagaaaaaaagttattgaatcaagaaaaaataagagtgcaaactttgtacttagtaattcaaatttaataactgaaaaattacttcaaatggaagatataagaaatgcaactaatataatgctttatctaaattttaacaatgaagttcaaacagataatttaatcaaaaaacttttgtctctaaagaaaatagtatcaagtcccatcacaataaaagaaaatcatacattaatccctactcaaataacagatttaaaagagggattgagaattggagcatatggaataagagaacctaacgaaaaatcacctacaattgatattaaggccttagatgttgtaattgtaccagctgtagcatatgatatacattgctatagattaggatatggtggaggattttatgatagatttttagaaaacttaagaaaagatgctataactattggcatagcatttgacttccagatattcgattctattccaaaagaaactcatgatgcacaattagactacatagttactgaaactagaattatcactccaaataattagaacattaagtatttccagaccccatttaatatagtaataaatactactgttaatatcttactttataagcattttaagtcatggcttttacaacaataagaaccatatacaatttacttacattaataaaaaccatgactttattgtacaatatgcagttatttaattataaaataccttcttatttcgtcgcatttaattctattctatctggaagttcactcatatttgtttcaacaactatgtatggaaaagaatcttccttatctttatactttatcttgactctcaaaacatcctttccttcctcaaccacactttctattttgtccatttctataccatatttattatttcctctagtcactataatgtatattttgttatcgattttagccgctaatgctctttcttcatttgtatacttatccatcacatctaatatcttttctggtattgaatttctttgtaatactgtataatctatgggtttagatttctctacaaacatacttggtatgaatataaatccccctataacgaatacaagagctataactccataaattatacctttaatattaaattttacattcaatcttatcactcctcccatatattctaaatatatgatttataagcttatcttagactctaaattattgattagtatatatttatccataattataaatatatgtaatgtaactaaaaaacatgtttttcctatttcataataaacgagctaaaaaataaaaagagctatatgaaaacattttcattgttttcatatagctcttgagtttacaatattaaaaaatacttatttgtcactgattccttcttgatatccagatgtttttgtaatctgtctataaagaacacaaaccagtattatgacgcccatatatccagtatatggatataaaataccaaccagcttatcaaatggtaggaagccacctataagacctaatatagctgctattaaagttattaatttaaacttaggatgtttatcatctacaaatctattagttactgaccataataaaggtacagctgttgtatatatacctaatataagaattattgagaataaaactccaattactggtgaaatcttatctgctaagaataatgatggtattgcttttgaatataagtttcctatatcagaaagaatagctaagtgcatcattatagctgcagccataagtgctactccacctaatataccaccacaaatagcttcttttttgttagcagcacttgctcctaatccagttaagaatgccataacaacaattgtgttataagtagtatatattacaccagatagataggcatttggaactggtttagctatctttacagtgctaagaacttgtgcagcttctcctatattacctatgtttttagctaaacttataccaccaactaaaagtgtaaagattattattataggccctattccacctagtatctttgataatttatcaagacctagtgaaacagttaataatgctactactgccatacctactctacctacaaatggatttaatccatagtattcagttaaagttgctcctgctcctgaaatcattactacgaaaacaccaaataagaataaaggtccaaaccattcaaagaatatccctaaatacttaccacaataaacacgataaattttgataggttctttaagttgaagctctttaccttttgacataactgaagcacccatccatgagaataataccattgaaattatcccaccaataatacctgcaaaaccataaaaagagaagaattgcattatttcctgtcctgttgcaaatccagaaccgattactgttgctacatacgcacctgcgaaactgatgactgttttaacatttactttttctgacatatctcagttacctccccatgtgaaattttttcttctgattaaataattcgataaactacctacaatttcctttaacataaaatacatgataactgttttatagctttttagtataataacttaaaacttataatctgattttataccctactcctcctctcataatttttttagattcttttatctaagtagtcattatatataaaattagtttctctatagattatatattagtcatatttttctgaatagtcaatatatatttgaatattttctctatttttgtaaaaatttgaatattttattacatttttgatatattgatatcatataaaaaaaagagagatataaattaatataacactttatacctctcttttaaatatattatattattaacaaacatgaataatttatatctcttacattctttttgcaataatagcttctttaacagtctttattatgtcatcacaagttaattcatatttttttaacaattcatttggagtaccagattctccaaatgtatctttaattccaactttctttacaatggttggacaagactctcctactacctcacttacagcagaacctaatcccccaattatgctatgttcttctacagttacaatagcattcgtttcttttgctgattctaatattaaatctttgtctataggttttatcgaggacatgtttataactctagcatttataccttcttcttgcaacttttcttgtgctaatagagcttcatttaccataattccacaagctataattgatacatcctttccttctcttaagactgtaccttttcctatttcaaatttataatcttcatcaaataaaactggtactgaacttctccctaatctaacataaacaggtccattatacttagctatttcaaaaataattttttctgtttcaactccatcagctggaacaagaactgtcatatttggtatagctctcattatagcaatatcttccacactttcatgagatgctccatcctctccaacagtaagacctgcatgagtagcacatatttttacatttagctttggataacaaactgaatttcttataatctcaaaagcccttcccgtagcaaacatagcaaaagtacttgcaaaaggtattttaccagcagttgataatccacaagcagcgcctattaaattttgttcagctatacccatattaaaaaatctatctggaaatgacttgtaaaaatcatgtgtttttgtagactttgataaatctgcatctaatactacaacattgtcatttatttgacctaattttactaatgctttaccatatgcttctctcgtcgccattttactcattgtcagcacctcctaattcaagcaaggctttttctagctcctcatcacttggagctgtcccatgccatcctgcttgattttccataaaagatattcctttgccttttatagtttttgcaactatcattgtaggttttttaactgttgatttagctatatcaagagccgcaaatatttggtcaaaatcatgtccatctatctcaattacattccaaccaaaagctttaaatttatcaactattgaacctaaactcattacgctttctatatctccatctatttgaagtccattattatctaaaaaagcaattaaattatcaagtttataatgtgcagcactcatagcagcttcccaaacaattccttcttgaacctcaccatcaccaagcaaagtatacacattccacggagcattatccaactttgatgccatagccataccacatgctactgaaaaaccttgacctaaagaaccagtagatatttccacacctggcgtgcctttcatgtctggatgaccttgtaacatccttcctatcttccttaatccattcagttcttccttatcaaaatagcctttttcagccaatgtagcatataatgctggtgcagcatgtccttttgataatacaaatctatctctatcctccattttaggatttgaagaatccacattcatttcatcaaagtataacgcagtaagtatttcaactactgataatgaccctcctggatgtccagatttggctctatgtatcattgaaactatatctcttcttatgatacgcgcaatctcatttaatcctttatggtctctcatgcaattacctcccttgagttcgtaattttatatcaattccatattattatatcacttttatgctatttttttgcgttatttttaattttattaacatagtacattaaaattaaaccttaagagatatttaaaagaaaaaagggattgtctaataaaagacaaatccctctttaaaaagtaaacaatcctaaacttatttgaagtccatcatctacttttatcatcatattttcatctagacaaccaattttttccctcagtctctttttatcgatagttctaatttgctctaaaagaattactgagtctttattaagcccatattcattggaacttatctctacatgagtaggtaatttggctttattaatctgagatgttatagctgatactataactgtaggactatatttattacctacatcattttgtattatcagaacaggtctaacgcctccctgctctgaaccaacaactggacttaaatcagcgtaatataaatcaccacgctttatttcacaattagtactcaccttgggcaatcttcccttcatttttatcatcagaagatacttcttcaactgtcatacctaattcagctagtgacagattaatttgacccatttctctataacccgttttcatagattctttaatatgaattttctttttctgagttatatagaactgaaaagcagcttttgcaaaatcttctctgttactgttctccatctgaactatactatcaacttcagaaatcagagagtcaggtaaagtaacttctattttttctttactcttatcgtacacaaaatcgcctcccagattataatatcatggttttattttagcaaataactgtttatttgtacaagctcattattttccatataaacacggtcaactcttcttgatatcatacataacacttcatagtttatagttcctaagtctttagctatacgctcagctgtaacttcgccttctccaaatagtataacctcatctccaacttttatgtctatatctttgtcaattctaaccattatttgatccatacatattctaccaactacatcaaacacttctcccttaataagaacctttggatttttttggattctagtaaatccatctgcgtatcctattggaactgtagctattgtttctttacctgtagttgtgtattttagtccataacttattcctacacctggttcaacttgttttatatgtccgatttttgattttaatttcatggctggtcttaattctaatctatctttaaatacatcatcagatggataatgaccatataatattattcctgctcttaccatatttaatcttaaatcagggcaatccataatagctgcactgtttgatacatgttttatagctatttttacaccagcctcatctaatttatcagacataaatttataattattagcttgtttataagtgtactctttacttacttcatcagctgtagcaaaatgagtaaacataccttctaaatcgatatattctaatttatttaattctattatttcctgtactgactcctcattaggttggaaacctattctagtcatccctgagtctattttaacatgaacacaggctttttctcctaaagattttgcaatttcatttatcttttgtgctgtttctaaagaataaactgtcatagttattttattttttatagaatcttcaaaagcttcgtctggagtatatcccaagttcaaaataggaagtgttatgccattttgtctaagttcaattccttcagcagttcttgctactgctaagtaatctactttttctttttctagcaattttgcaacttctactgcaccatgtccatatgcatcagcttttattactccacaaatcttaatatcttcttctaataaatttttaatattatttaagttaaatcttaagttatctagatttatctctgcccatgtaggcactgttattttttgcatgtctttagtcccccttagtttctgtattcaaaatctttgtattttactgtaaatcttggcactccctctttatctaacacttccattttttcaggattttttgtgtcagcatttacatataatacttgcttgttaaaatatttattatccccaggaataaaagtctctaaaaccaaatgtcctttggataactttactttcatctcctcattttgaagatagttttttataaagtctcctacaaaaagatattgattattttttcctgtattaggtaactccactacatcactaatctttggatttttaactaatattttatcaccttgatattctatacttttcccttttaaatgttttggggaaattacttctaatttatagttatcggtttttttataagtatgaattaaaacataattgtgtgggcttttatttccaactacttctacttcagctttacaactgtaataattcatatcagaaatctgcttttgaaaatctttgtatacttcttcttttgtggactgtcgtttttggcatcctattacaattataaccagtgccaagaacataatacatactatggtccacttttttctcacatcacacctcctacttcagtttattcattgtataaagcttttattatatcatatctacaaattatacctttaagtttgttgtcatcatctactacaggaactctgtttattgattttttaatcattacattagctacatcatcaaacttatcatcttcatgaacctttattatatctttagacataagttctccaaccttataagcagctacttgttttatatctttttcaactttttttaagtcatctaagaaaatcaatccttgtaatagatttatatagagaggtgcttctatatatttttcttttttaagaatatctgtttcagaaattattccaacaactctattctctgaatctacaactggcagacctcctattttttctgcaattagcatattagctacatctgctatactatcatcttgttttgctactattacatctgttgtcattatttcttttgctgttttatccatcataatgtaatcactccttagtccttaattatggttatcgcatttgctatagcataatcttttgaatgtgatattgaaacttttatttctaaaacattataatctatgcacatttttgctagattattataagtttttactattggttttcccatttcatttctgagaacttctatatctttaaaattaaacaatctaattcctgtacctatagatttacttatagcttccttggctgcgaaattacctgctatactttctgctttaaaattcttagaattaaaatactctatttctctatctgtaaatatcttctccaaaaacctattatttttgtctacagcctttcttattctatcaatttcaattatatctacgccaatatcaaatatattcattgttcctccagaaaatttataatacttctttcaataattaataatgaatttataaatttactatcgataatacacattattatttagtttatgttacttatcttaatttaataatcattataataaaactgtaacttttaaaattatttgtaatgaatattatatacaaatctattatattatttattatactacacaactaagcaaattttttaaattttataaaaattttatatgtatttcttatatgaagactttttcacttacataaaagctatctaaatcttctttatcttattaattacaacataatttggcagtaaatttaaacattttgtgaatttattatcactaaaaacttacaattttatcgttattttattaacaccaaaacacaaaaaagccattttacccaaaagtttttttggtcaaaatgactttttatactctaaattaatttattaaatccactcagcagattctgtcaatatgacagttttatcttgagttacattaatgaatccttctgctattttcgcctctttaaaacttccctctttttttatctttaaagttcctacaggtatacctgaaacaaatggtatatgacctttcaacacccctttgtctccttttgtagttctaactactatcatttcaacatctccatcataaaaagtattacttggagttacaactttcaatgaaaattcactggccatgactacatacttcccttcgcttttctaacagcgtcttctattgttcctacaaataagaatgctgactctggtaagtcatcatgtttcccttcaagaatttctttaaatcctcttacagtctctttaacaggaacatattgacctggatttcctgtaaattgctcagcaactgtgaatgattgagataagaatctttgtatctttctagcacgtgcaactattaacttatcttcatcagataattcatccataccaagtatagcaattatatcttgaagttctttatatctttgaagtattgattgtacacctctagctacttcataatgttcttttcctactatactagggtcaagaatccttgatgtagattcaagagggtcaactgctggatatatacccagtgatgatatttgtcttgataaaactgtttttgcatctaagtgagagaatgttgtagctggtgctgggtcagttaagtcatctgctggtacatatactgcttgaacagatgttattgaacctttcttagttgatgttattctctcttgaagtgcacccatttcagtagctaatgttggctgataaccaacagctgatggcatacgtcctagaagtgctgaaacttctgaaccagcttgtgtgaaacggaatatattatcaacgaaaagtaaaacgtcttgtccttgctcatctctaaaatgttctgccattgtaagtccagttaaagcaactctcattctcgctccaggtggttcattcatttgaccaaatactagagctgttttatttataactccagactcactcatttcgccataaaggtcgttaccttctcttgttctttctcctactcctgaaaatacagaaataccaccatgttgcttagcaatattgtttataagctcttgtattagaactgtctttcctactcctgctcctccaaatagacctatttttccaccttttagatatggagctagtaagtcaactaccttaataccagtttctagtatctctgctgtagtttctagttcatcatacgccggtgctggtctatgtataggtaatttaggtgcagattttggagctggtttcccatcaactggttttccaagaacattgaatattctacctaaagtctcatctccaacagggacacttattggccctcctgtatctacaacttccatacctcttacaagtccgtccgttgcactcatagctatacatcttacagtatcatcacctatatgttgagcaacttctgcaactatttctttatctcctaactttattactaacgcatttaataagttaggtaggctttgttcactatcaaacttaacatctagtacagctcctacaatctgtactactttacctacatttgccatttcctaacctccctattttagagcttcaactccaccaactatctctgttatttcttgagttacagctgactgtcttgctctgttataacttaactctaaattagatagcatttcattcgcattgtctgtggctgattccattgcagttcttctagcaccttgctctgatgcaaaagattccaaaattccaccatatactgtacctgatataaactgaggtacaatataacttaaaactgcttctgctgatggtatatattgtacttttgatctattttgtttttcttcttttactgccattccttgttcgtctgtatctttttcaaagactaatggaagcaatttcaaaatttcaacttcttgtgataaagcagatttaaattttgtataagcaatataaacttcatctacttcaccttttttatacaggtcaataatagtttgtgaaatttctgtcgcatcttcatatccacaagcttcaacactatttatatcttttgctatattgtagtttcttttagaaaaaaattcatgtgctttctttccaacagtaatcactgtttcctttttacctttcatatgagagacagattcctttaatacattggaattgtatccacctgcaagtcctctgtctccagctactactacataacatttattttttacttctctttcttttaaaaattcatttctaattccacgtgttgtttgggcaatatcttttactgtattgtataaagtattaaaatattctcttgaatcttcagccttttcttttgcttttctaagcttagaagatgcaactaattccattgctttagttatttgctttgtactttcaacagttcccatacgtgttttgattgctttgattccagctcctgccaattaatttacctccttttttaaaaaggattatacttcaacaacaaacttttctttaaattcatttattgcatctgttaaatcatgagtgaagtcttctccacctaatatttttcttgatatttccggataattattatctacaaatgcatacaattctgattcaaatctagctatattatctatcggaatatcctctaaatgattatttataacagcatatattatcataacttgattttcaacttttattggttgatgctcaccttgttttaatatctcaacgattctttcaccttgagcaagtctctttttagtatcttcatctaagtcagaaccaaactgtgagaatgctgcaagttctctatattgtgaatatgcaagttttaatgttcctgcaacttttttcattgctttaatttgcgcagaaccaccaacccttgatactgatataccagggtcaactgctggtcttacacctgaatagaataactctggttgtaagtatatttgaccatctgttatagatataacatttgttggtatatatgcagaaacgtcaccagcttgagtttctattataggcaaggcagtcattgaacctccacccaattcatcagataacttagctgctctttcaagtaatcttgaatgtaaatagaatacatctccaggatatgcctcacgtcctggtggtcttctaagtaacaatgacatttctctatatgcaacagcttgtttacttaaatcatcatacactataagtacatgtttcccattgtacataaattcttcacccatagctgctccagcatatggtgctatatattgaagtggtgctgattcagatgctgttgctgaaactactattgtataatccaaagctccacctttttctaaagagctaactaattgagctatagtagaacgtttttgtccaattgctacatatatacagataacatcttttcctttttgatttagtatagtgtcaataactatagatgttttaccagtttgtctgtcacctattattaactctctttgacctctaccaattggtatcattgaatctattgatttgattcctgtttgtaatggttcataaacagaccttctatctattataccaggtgcctcagattcaactggtctagtttttgtgtacgctataggtccttttccatctattggctgacctagtgagtttacaactctacctattaaagcttctccaactggaacttcaactattcttccagttctcttaactatatcgccttcttttatttcactgtcatctccaaggataacagctccaactacttcttcttccaagttaagtgccataccatatatttcacctgggaactctagcaactcaccagacatagctttttctaatccatatacactcgctataccatccccaactgttaaaacactacctgtatctgtcaactcaactttattctcataattttttatttgctgtttaattatagaacttatttcttcaggttttaagttcatgggttcaccgccattcttaagatattacttcagatagcttttctttcatcttatcaagacgagttttcacagtgccatctatttgttcatttccaattctaactagaactccccctagtatagtcttgtcaacaacattttctatagtaacatttttgttgtatttatttgaaagtttgacttcaagttctttaatatctgtttcactcattggaatagcacttattgctactccatcaattacattgtttttcttatttaataattctttataagctaattcgatatcttctaaatatgatattctatctttatctactaaaacttttaaaaagttttttatgttagaacttacttccttactaaaaataatttctaccaagtttttcttttctgattttgaaactaatggtgattttaaaactttgtagaaatctttactaactttagtcatcatatctactactttttctagttctttgaataagacatcagttgaattttcttcttctcctaattgaaatagggcttcggcatatctatttgctattacatttatcatttagcttcccctacctcttttataaagttttctatcaattcttcatgtttagatttatctaaatctttttcaataactttagatgctgcaagtagtgctatgttagatatatcatttttgatttcatttataaccttttgtctttcttgttctatatctttgtttgctttttcttttatatcaagagcatctttctttgcagtatttactatatcatctgatttctgctctgctcttatagttgcttgttttatgatttcttgaccttcatccttggcaaaattgatttttgactcatattcttttttcagagctaaaccttcattttttgctttttcgccttctgccaaatcacttttaatatcattttctcttgattcaattatatttaatactggcttgaataaaagctttctcagaagtaaaaatattataaaagtattaacaatttggaacacaaattcccacgttatacctactagtgctttttccataattatcctcctttccataaatcataactacttataatcacgagatgataaagttcatctcatgattataagtttgagatgatttacctataaacctatctcaaaatatttaaggactaaatctacattcctaagtatttaaagaatggatttacgaatagaagtattattgatataaccaaaccatatattgctgaagactctgctatagcaactcctagtaataaagttgatgttatatcacctttagcttctggttggtttcctactgcttctgcagctttagctgctgctataccttgacctatacctgcacctatacctgttgcaactgctatccctgctcctattgctgatgctgccgctactattgctgtttccataattatttcctccttaaaactttaattttttaaattattttatttttatcttaatataagttgatttcttaatctaactctcctgcacttgatataaataccattgttaacattataaatatatatgcttgtaacaatcctgcaaataagtcaaagtacaagtgtaatgggactggtattaatatttctccaattggtattgataatcctggtattaaactagatataaaacctaaaagttgataaaacagacccattattattgttccacctaaaatattcccaaatggacggaaacttaatgatattggtctagctaactcacctataatattgattggtaacattatggcaagtggttgagccaattctttaaagtatgataaccccttaaatttaactcctgcaaaataaatcataaaaaatgtaatcattgcccatgcagcagttgtgtctaagtcggttgttggtgaccttaatccaagtaatgggcttaaatttgaacatgcgaaaaataaaaacaagcttcctatgtatggtatcatatatggcattctttttactgtatttttacccataacatctgtaaccattttagcaagaccacctactgcaaattctaagaatatttgaactttactagttggaactttttttaagtttctagtcaaaaaataagatgctatcgctaaaaaggccattattccccaacttactagtattgtttcactaatcttaaagtttcctatgagataataatgcgcttgattcatacttatgcctccttcctctttaatttatttataaagttttttgataatatgacaaactttgtgctcaataatcccaatgctgttccgattatatttaaatgtggtactgtagctgatgcaattagaacaactgccattataaataatctaatagcatattgtgctgatgcataagcttgtgccttcccagcaggaaatgtcactgatttttccagtgatatcgccaataatctaaaatttaacatagctattatagagccaaatataagtcctaataatactggtttacttaatgttgatgttatcaacattagcacaattaaaactacatcaaatattactataccttttgttactgaccttacctggttaagtaattttatatccaatatatcacttccttcgtgtatatactattagagttttataaacaccactaaaagcacctccaacacccaacaataaaaatattattgtcagaactggagtagtattcaatttactatctaaaaattttcctaagaaagtacatcctaatattgatattacaatcatcaatcctatttgacttattaaactaaacaactttgcaatttctgtatgtgtatttcttttactcataaatagtatccctcattattataaaataaataacatgtaattaatctatctcataaatttatttaattataaaatatatcttactactaatctgatgatttttcaaatactttcttttaatcatttgataccattgtatttcagtgtcataatttgacatttattgtcatataaattttatccactaaaattttatgagttctattcctgcttcttttaataattctgtagacatatcatctggataatcaccttcataaacaattttcaatatacctgcatttatgcacatttttgcacacaaaacacaaggtcttgtagtaacatacaaagttgccccatctacactaataccattatgagcagcttgtattatcgcattttgttcagcatgtaatgctctgcataattcatgcctttctcctgagggaatatttaattcctgcctcttacatccaatattttcacagtgttcaagatttctcggagaaccattatatccagttgttaatatttgtttgtctcttacaattacagctcctacttgtcttctaatacaagttgaacgctttttcactacttctgcaatttccatgaagtattcatcccatgatggtctcataatttacttttctcctctttgcttatgtactggtattatatatttattagatttcaacctaaataaatacttatttttatattatatacacatgttaattgaatgtccaataaaaaaagagcatttttaccatttaaattttaaatacccgtcatatgctctctttaatctattaaatttattatatcatcttaataaaatattaatagctttatctaatataaattaattttggggataaatcccattgtttagtatggcttctaaaacccctccagctatacatctagctttatctgatattgtaaaagcattcttaacttcttcttttctagggtctatgtctagtatttttaaatttttgttcacctttgctccatcctttaataaacctctaaggactccagatattgttgctctaacttcatgttttttttcataattattaatataacaaagtaggtctcccttttcaactatatcacctatcttacatacattttccattataccatcatactgtgaatgcataactctctctttagaaaaaccttttattgctcctggtactcctgtatttttttctgctctaccattagttattattcttcctagattatgacctctcattgtctctataacaacatctacatcttctcctgcacaaaatccaggacctaaagctattgtaagtggtgccatatctttagttgtacctaagtttttcttagcgagtattccatcaaccaaaacgattggatttaacttagataatttttctccttttgggtctataatcaaggctactttatgttgagataaaacttcttctatttctttttcagtattgcaaaatatacattctacaccttcaacagttacttttttttcataaacagcctcacaaaaagaaatttgccttcttatagctaatggctcttctatttctaacgcaactactttaaaaccactgttgtgtaatttatgaataactgctgttgctaaatctccagcccctcttactgctatacaattcttcatgtattaccactcccaataatattattaatattcaattctcaatttaactaatacacttaatacctataatcttaatcgtaagcaactaacatgccacattaaaatagactactattctataaaaccttgtaaaataagcaatcttttttaattggtaaaaactttttattctcaattcgagaaatttatcaattcataattcctattttgagaaaaaatatataaaaaagaaccttcttacataaaattatatacactatataagaaagtccctaataaatatttatagttatttatttttatttagttccaaacaatctatctccagcatcaccaagaccaggaattatatatccatgttcatttaatctttcgtcaactgatgcaacatatatatcaacatcatcatgatatttttgcacttctgctataccttctggtgcagctactaaattagctaattttatacttttagctcctttagacttaagtaaatctatagctgctacagcagaaccccctgttgcaagcatagggtcaactactattatatctctttctcctatgtcttgaggaagcttgcaataatattcaactggttttaatgtttctgggtctctatatagtcctacatgtccaacttttgctgctggcattaagcttactaatccatctaccattccaagacctgctcttaaaattggaattattgctaattttttacctgcaactactttagatgatgttttttgaataggagtttctatttctacatcttttaatggtatatcttttgttatttcataccccattaacattgcaatttcagttaaaagctctctaaagtctttagaaccagtatttttatctctcattaaagttaatttatgttgtattaatggatggtttgtctctaccactttgctcattttgataattcctcctgataaaactgtaatttttattatttattatgtttttcttctattgatttaatcatgtttactcttctagcatgtctatcaccttcaaaatccgtattaatccatgcttcaactatctcaagtgctagaccttttcctaaaactctttcgcctaatgataacatatttgcatcattatgtgcttttgacatttttgcagaaaatacatctgatacaactgcacatcttatcccaggaaccttattagcagctaaagatattcctatccctgtaccacaacataatattccataatctacttctttatttataactgaatttgcaactatttctccataaacaggataatcaacagaatctgtagcattattagttccataatctacacattctatacctttactttctaaatagcttattatttctttttttaaattatatcctccatggtcacagcctaatcctatcttcatttgtttatcctccgtttcatattttttttactatttcgttgacagaatacattatttctctcatagtgcttctataaatatccaaatttccaccaaatgggtcagatatatcttcctcatttttatttgcaaaccctttaaaagtatacactttttctttgcattttggaactgcttgtactaaaatttctttatgagatttagtcattgttagtattatatctgattcatcaattaattttttagtaattactttacttctatgatttgataagtctataccgatttcttttagtacttctatagaattttcagaagcacccattccatttgctgtagatatacctgctgatgatatcgaatattcttcaatacttcttccagattctttaattgctttccttagtatagcctcagccatagggcttctacaagtattacctgtacacacaataagtatattcatattttacaactccctcttaagcctttatcactttgtatcctgctgacttcagtagtctattcataattgcttgtccaactccagtcttagggaactcttctgaatatatgacatcaacgccctttttgtccatttctataagagcatcaaacagattacttgcaacttcttcaagagagtttcctaaatcgattacttctccatcataaaactctcggtttctactgatacacattacacctgtctttagacctttgtctctattagattttatcatatcattaatctttgttgctacattttctctttttccagatattatatatacatctgcatttggagaataatgtttatatttcattccaggagctttagctttttgattatcttcttttttacttaatgatgggtcaagctttacttctccaagaagttcctctaaaacttctttagttatacttcctggtctcagtatcataggagtctcttctgttaaatccaatacagttgactccaatccaaaattactgtctcctcctaaaactattccatccactcttccattcatctcttcatatacatgttttgcttttgttggagatgggcgacctgagatatttgcagaaggagctgcaataggtataccagcttcttttattattgccctggcaataacattagaaggcatccttattgcaactgtatcaagccctccactagttttgtatggaattatatcttttttatttaatataattgttataggtcctggccaaagcttttctataacaagtttagctttatcacttatatctttggctaagtcatatacttcttctttttcatatatatggactatcaatggattgtcactaggtcttcctttagcttcataaatcttctttactgcattttcatctaatgcatttgcacccaacccatatactgtctcagttggaaaaataactgttttaccttctctaagaagttttgcttgtatttttatttcctcataatcaatattatttatatcaatattacttataatagttttcatcttttgtatgcctgctttcattttaattttatatataatttacaatcattgtacctaacaagaaaccaattatacaatacacactttttgaatgtggaaaaatttcttccaatacaacatacatcatagtacctcctgctgtagcaagaaatactcctataagagaagtaaatactcctccaaaataaacacctaaaaaacttcctagacccataggtaatccagctattacagtaaacaaaataactttacttagtttcattttattgcaaactaagcctaatgccatagctaacccttctggtatattatgtagacctataactatagcaagtgtaatacctaaactttcagttgacataaaagaagaaccaatggctagtccttctggtaaattatgtagtaatatacttatgaatataagatatccagatgccatatttccagacacatctaattttgtttttatgtacatagttatgagagctccaacaaacgtaaatataactgtattgattatccccattttgtccatggattctttcattaaatcaaacaccactacagccaacattattccaccagataatcccataaaaaaacttagatatttatcgacctctcttttaaaaatggctgatattactcctcctaatcctgtccctataacacctgccaaaagcccaattattgttacttttagtatcatataaccctcctatacttgtatataacaattatatacaatagaatatgataacatgacctaaaatgcaaaatagctgtttcaaaatagaaaataatttctaggaagaaacagcttctttaaaacattacttatattgcagtcattttttctgtttggtcaacagtaattaaagcatctatcatttcatctatatctccatctaaaaatgcatctaacttatataaagttaaatttattctatggtcacttattctaccttgagggaaattatatgttcttattctttctgacctgtctcctgttccgacttggctttttctttctgctgctatatctttgtgttgttctgccaatgctttatcgtaaagtctagcttttaatatttttaaagcttgctctttattttttaattgtgattttccatcttgacaagatactacttcacctgtaggtatatgtgttaccctaacagcagagtcagtagtattgacactttgtcctccattacccgaagaacggaaaacatctattcttaaatcatttggatttatttcaacctctacatcttcaacttctggtaatactgcaacagtagaagttgatgtgtgtattcttccaccagattcagttgatggtattctttgaactctatgaactccagattcatactttaatcttgaataagcacctttaccttttatcataaaagatacttctttatatccaccaactccagtatcacttgcactcaataattctattttccatcttcttctttcagcataccttgagtacattctaaataaatcacccgcaaatagagctgcttcatctcctccagctccacctctaatttcaactataacgttcttatcatcattagggtctttaggcaataatagtatttttatttcttcctccagaggtgctactttttcttccatctcagctaactccattttagctaattctcttaattcttcatctgactcttcttgtaaaatttcttttgattcttttatactatctaaaacgcttttatactctctgtatttcataacaataggttccaagtcagcatgttcttttatatatttctgccaaactttttgatcatttattacatccggatcacctattttttcacttaagtctttatatgtatcttccaatacctctaatttttttaacatactttcacctcgattaaatgtaacatatcaattgttgattatatcatatattgtaacctataacaactctatcaatgccttgaatatccttctttgtgtatatttttttatatccattacttttcataatatttattacatcttcagcttgattatgaccaacttcatatgctaatattccacacttatttaaatatttcttaccttgttctgttattcttctataaaagtctaatccatcttctccaccttcaagagcattatatggttcataatctttaacttgtttgtgcagagtttctatatcttgttttttaatatatggtggatttgaaactatgatatcgaattttatgttactatcacttattgctgtaaataaatcagaattaatatactttattttttcaccaacttcatttataatagcattttttttagctatttctaatgctgtctctgatatatcaaaagacatgattttagaattttcaatgtactttgctaaacttattgtaatagctccagaaccagttcctatatctaatatacttacatcttttttttctctacatatttcaattatttcttctactaaagtttctgtatctggtcttggaatcaatacgccttccttaacaaaaaaatctaatcccataaactccctattttcaactatatatgctattggtcttccatttaatctttcttctgcaaaacccataaattttgttttttgttcttcagttagctctttattcagatttaagtgaatatataatctatcaacacccaatgttttttgtaacaataactctgtatctaatcttggagtatcacttatatcttttagtttatctgaatatttaataattatatcttttatcgtcataacaaatatccttttctctaatctactactgctttcaatgcttccaaagcaacctctaattgctcatcatcaggctcttttgttgtaaaatattgcaacatcattcctggatatgcaataattttagtaaatccattatcatatttcccaagaactctaattacctcataagataaacctgctactataggcacacatataattctcataaatattctaagaattggatttggccaaccaaaaaatgcaaacaatattattgatacagccataactataaataggaaatttgtaccacatctaggatgtaatcttttaaattttctagcattctctactgtaagttctaaatcattttcatagcaatatatagatttatgttctgctccatgatattgaaagactctttctatatccttacttcgtgaaatcaatactatatatgcaaataatatagctatccttatgattccttctattaaattaagcataaaatcattaggcattactttagaaaaagctcctcctaccaatgtaggtataaaaatgaataatccagcagaaagtaacattgctatgaccaatgaaaatattataattatatcatttgccttatctttaaaaattttctttataaataaatcaaatttatcctcttcagcttcttccataaaaaactctgaagaaaagtttaaactttttatcccttgaatcattgtatctatcataacaaaagaacctctaacaaaaggtatcttatctatattcttatctcttacccaactttttattctatcttcttttagtgctatttctccgtcactttttctaacagctaccgctcttttgtcttttgactgcatcattacaccttcaataacagcttgcccacctacagcttgttttgccatccactcacctcattttattgtatttagaatactcaattttacatatttattattataatacaaaaagacaatttaaagtagaatatgaatgtttttttgtaataaaataggagttggcttcctccaactccacttttataaaaattagtccattttgaatcttttcttgaatttgtcgattcttccacctttttctatgttcttttgttttcctgtatagaatggatggcactctgaacatatttcaacttttatttcgtccttagttgaaccagcaacaaatgtgttcccacaagcacaacgcacttcaactggattgtattttggttgtatttccttttgcattatagtcacctcttctctttatttaaaaaaattaattatattaactttctttttacattatcaactacattattatagcacaacttattatgccattcaagtgatttttctattagtttatataatccatatttgcatttgtattattgattttacaaattctttattgattttacaaactctttattgtccttagttctctttataagttcaatgactttatctgtaatttccattactgaattattactcatttctcttcttaatctccaaagagcagtcttttcttcatcatcaagcaataaatcatctcttcttgtaccagacttgtaaatatctattgcagggaatattcttttttctgctaattttctatctaaatgtagctccatatttcctgtacctttaaattcctcaaatattacatcatccatcctagaaccagtttcaaccaatgctgttcctaatattgtcaaagaaccaccctgtctaatattccttgctgcaccaaagaactttttaggtccatgaagtgcaccagggtcaatacctccagataaagttctacctgtaggagatattgtaaggttatatgcccttgccaatctagttatactatctagtaaaattactacatctttaccatgttcaactaatctttgagctctatttaacaccatctctgcaaccttgacatgatgacttgatacttggtcaaaagttgaatatataacgtctccttcaatagattctttcatatcagtaacttcctctggtctttcatctataaggagtactataagttcaacatttggatgatttttagctatgctatttgcaacgctttttaaaagaactgttttcccagcctttggaggtgctactatcaatcctctttgtccctttcctataggtgaaattaaatctataattcttgtagctatttcatttctattagtttccagtgtaagtcgttcttctggaaatattggtgttaatgtctcaaacgcatttctttgtatagctgtgtcagggttttcatcatttattttttgaacatataaaagtgctctaaatttctctccactttttggatgtctagttattcccttaatcttgtctcctgttttcatattaaatcttcttatttgagatggtgaaacataaacatctccttcagtagacaaataatttgaacctcttaaaaaaccaaatccatctggcagaatttcaagtacacctactacttcatcctcttttgatgtgttaaattcatctactatcttagattcatcaacttgtttaggcatataatagtttttattattatttctgaccattctattagatatatttgatgacttattactatcatttacactcgttgtcttattatagtcatttctttgatttctattttcttggttttgggaaatattttgggtatctatttctttcttgttgtatgatttggtagggctcttatattcaacttctttttctatactttcacgctctatattttcttttctattctttatgtcttctttaatatcttcatttttttctttagtctcttcgtttactttttcctcatttttacttttggaatttataatctcaattaactcatttttcttatatgtagtaattgattttatttttaattctttagctatctctcgtagctcaactaaggtcttactacctaatccttctaatactttatcatctaaaatcaaaaaaatcctcctcatctatatattcatttatatacatacttattttggaaattgaaggcatgaaaaagaaaagttttatttaaacagttaagtctaataatatcattatttatatattatggtcaataaataaaatttaaaacattattacctactatattactgtatttcaagtccaatcttagcacgtttttataaatttatcactatatttatatcttataataatattttcctttaaaatatgcaactattataaaaatttttttttacatttataaattctaaaaaccatatataactaaaatattgtaagtttttgactacatcaagttatatatggtttttatatttatgtatatcaactgctgtcatttatcttattacatagttgcaatcatactcaaaacagctgttatactcgttattacgaggattcccacaatcccaacagctattattctattaattcttttctgacttgattttgccaccatacatcacctttcattaattatttttgaatttcaagttctctagcttcattgacttcaattaaatctattttttcatctgtattattgtataacacattgttatttttatcaaattcactacatacatgtttcaaatattttataaaatcttccttaaggtcttctttctttagagcaaagtcaacagtagcttctaaaaatcctagcttgtccccaacatcatatctcttgccttcaaaattgtatgcatacatagcttctttcttagataatatttttaaagcatctgtaagttgtacctctccacctttacctggtggtaaatccttaagaatatcaaagatttcaggagttattatatatctacctaaaatagcaatatttgaaggagcttttcctgactctggcttttctaccatgtcttttaccttgtaaactctaccttctatattttttgcttctattatcccatatttattagtatcttcttgatttaccttttgaacacccaatattgtagttctatattcctcatatgcatctgttagttgttttagacaaggtacatcattatctacaatatcatcccctaacattactgcaaacggctcatcacctataaaatgcctcgcacaataaattgcatctcccaatccttttggctctttttgtcttatataatgtatgttaatcatgttagatatgttttgtactacctccaacaattctttcttaccttttttctctaaatcaagttccaattctacagatttatcaaagtggtcttcaatagattttttatttctacctgttattattagtatttcctctattcctgaggccacagcttcttctattatgtattgtagagttggcttatcaactattggtaacatctcttttggttgtgcctttgtagctggcaaaaatctagttcctaaacctgctgctggtattacagcctttttaactttaacttgcatagaatcatctcccactaattaataaataaaaagtcctatcttgataggactttaaacttttagtatattttatcattaattcgatatatttaccatgtggattacaataatgtttataatagcttttcaagttctgctactaaactatcaaattttttgattgtattttctatgggttttgtattagttaaatttatgccacttgattttaacaagtttattggataatctgaacttccctttttaagaaagctcatatagttatctgaaccattctttaggatgtcttgggcaaaacttactcctgcactacaacctgtagcatatttatagacatagaaactattataaaaatgtgggattctagcccatccgaccttagataattggtctaattcatagctttgtccataatattttttaagaagttgtccccaaacatcatttaatactaatgcgtttacactttttcctttttctactaactcgtgtatagttttttcaaattcagcatacatagtttgtgtataaagagtatcttttatcaagtctaaatactgtgttatataataagctttttcatcattgcctttagcttcttttataagcatctcgtaaagtaatgcttcattcgttgtagatgcaacttcgtgagtaaatatagacggatttgaattaaaataattctgattcttagaacttaagtattcatatacagcatgtccaagctcatgtgataaagtcgaaactgaacctaatgaattattataatttaaaagtatatatggatgattttcataaacagataagcagtatccaccacttactttattttcatgtgaataaacatctatccatttttcattgaaagctttatatactacatcattgtattcttttcctaaaggtgacaacgctgaatatactatactttgtgccttttcataattaatattattatcaacagccttaaccataggcacaaacatatcatatgaatgaaccttatctaattttaatactttttttcttaaatctatatatttgtgtagactgtccatattactatttacagtccttatcaaattattgtatactttttcatctacattatcagattccaagtacatttctaaagaagactcataacctctttcctgagaataaaaaatattctttttaacttgaccagtaattaaacctgcaattgtatttatattatcattgtaagttataagttcatcttgataagctttttttctattttctctatctactgactctaattcacttgcatattgcgctggtgtcaaattagtttttctatccatatttctaaataattcatatacttggcttggaagactacttattgaagatactttgcttagaatatcttctgatttatcatccaaataatgtactttattccttcttatatctcttaaatatgcaccatatttcctatttatatttttatttgaaataattttcttgtaatctttgtttgataattttagtatttctaattctaaatctgaacaaatccccatataattcccatatgatttactcatactatcactcatatctaagtacttatatgaatttttattagtatcttgttttaattttacataggcagaaagtttatttagtcttatatcaagtttttccttaatgtttaaggcaaaagacaaatgtgttggcgattttgttactttacctatgtaatttttcaactctttagtatctttatcaaaactcttaagttcttttttccattggtcatcacttttgaacaaagattgcaaattccaacatgttttttcatagtctacttcttgttttttttcagcatcatcttcagtatcattattattcatgacagcaattgctctgtcattattcttttgatatccttggtcagcttttatacttattattaacatgcaaaaaatagaaataaataaaggtattattgctttgcacaattttctattcataaaaagccatcctttcaataaatttacttaataataggatggctttttttagatatattattcaattattcatactatataaataaatatcgaattaatagttatccacataataatcaacatattcacaggttttctttacttagaaatttagttatttcaacatgaatctcttttgataatagcttttgttttttctttttttacattttattaacatttctgccatacttatcaacaaattttgttgatttatatgttatttttgttaataactatacttttttcaaaagtctattaacatattatacacaagttatccacatcttatacacataatcttgtaaaccttattttgtacatattttcgtaactaaaacagtcatgtcatcttcgatttgtaacgcttgtaactctaatgctctatccaatattaaatttgaaatttcctttggatttgtagtctctatattctttaagaagtatattaaccaattgtctcctaaattgttatttcttcctgcatctacaattccatcagaaaccattataacatagtctccttccttaacttttacattttttctatcaatttttacatctgataatatacccacaggtaatgatgatgatgatattaagtcaacttctccatcctctctttttatataagtagaacacgctcccatctttatagtttctaaacaacctcgttttaaatctaaaattcccaaatccagagttgaaaacatctcttctgaagattttaacaacaacatattatttatagtatcaatgactatctcatctttaatttttgcatctatcattttttccagtatatcaatagtggcagaagattcttcatatgcttttttaccctttcccataccatcacttatagccatcatgtatttaccatcatttatctccatgtatgtgtaattgtctccacaaaggatatgcccatcccttgacattgctgaaacttctgtaacagccttatatttttgagatttaacgaatgttgccttgcatttacctcctaaacagtgacatcctatttttctaacagacatattttcacctactaggtctgaaattatatttacaattttatcttcacacatacatccatcatgacaagttttcttttctattgatatttcaaactcattgttactttttgttaagtaacttactttatcaactgttatatcatatctttctaactgttcatatatatttttttccttttctatatctagcattatgtcaccttctaaatcttgagataaggatttaatggattttgaaatacttcttatctgatttgctattaactttctactttctgaaaacttcacactccaatcataatctaatacaaacattttgtaatagtgatttgatattttcactatcgactctggtttcatacattcctttctaaaatttttaggtatatcgtttagacttaactcccctttctcctcaattttttcaagaatgttatatatcatagtgtatgtatgattaaatcttgactcccagcacattcttctcatactacaacttttacattcatcattatgaatcatatctattacattagctatatctctttggtctagcactttgtctttttctcttatcttatcaaatgtatctgcaaggtcatcataagttttataaatactgttcaatctgctattagttaggtttttgcttctcataatataatcgtatacgatttcatttgaagccacattactttttattaatttttcaatcttattaaataatctctctggcaatactagtactatcaaacaacctaatagtatatctcttaattgcatcatattagaagtaataccagaagtatataggtatattattgtccaacttagaatatatcctagtatacagaaatatttatttattttattaaatgctccacttattaatcctgaaaaagaatatatccccatataaacagctgatgtcatattatttaaaatggatgctacaccaataattacaccactagatgctcccatggtagctccacctactattgaggtcagcaatatcaatacggtcgataaaatggtccttattgatattccaaacagagatatatctcctattcccattatgctaaaggttagcagtaaacttattgatatagcttcttctgtccgtacagacatcctattgttgacattggccattaaacctatcccataagaaaacacatatatagatataaacattattattgcttctactcctgctataagaagaccatatacatacctatttgaaaagaaagcttgtcccatggagattggaagtagtattattgcacctataaatgcaaccttagcaattgaatctgataattttaattttttattcatagccataaatattgtaaggcacacagcatattttgctacatttccaaaatcattagatgataacaatattcctaataatgttgatatgaatacaggtatcttgtacttatcaatctttgatgcacatataaaaaaggcaattcctaaaggagctacagagtctactataatagacctactaagtaaaaatcccatcacagcgaatgccgccgtagtaaaatcaatatatccgcttattaattttatgacatttggttttacagtcttattcttcacaactgctacacttctttgcataaaaaaacctcctcttttgtttatattaagaattgtaacaaagaggagtaattttttttgtcataatcggttttaaaaatcaaaaaatattaatacattttttttgacttttgacatattaagccttccaaattatcgtattcacttacggttatttcttctatttctaatttttccattattatattcaatatttttacaccagcagttataatatccgcacgtttttcttgtagcccttttaagttctttttatcacttaatgtcatctttattaatttttgtagaatttcttctatttcttttttgtgtattttactattatgtattttttccatagagtaaatctctaattcttgattcattgctgataatgatgtaatcgtacctcctatacctataagagtttttaatcctctgtcttttatatgatttaacgttttgtcaatctcatcatatataaatgaactcatagcttcaaactcttcatcttcaataatatcgtgcttcaaaaacctctctgtcatcctaagagcacctacattctcacttttattaaatttaattccttctgaatcacctacaataaattctgttgaacctcctccaatatctataacaataatagtatcatcaccttgtattccttctaaaacacccttaaagcccaaatttgattcttctattcccgtaactatatcaacatctattccagtttcttctttagctaatttaacaaagtaatctccatttttactgtctctaagagcagatgtccccatacaataaattttttcacacttttcatcattacacttatcagaaaattcttttaatgcttttatatttcttttgatagcatcttcttttatatatcctttactatccacaccataaccgattctagttgtattaacaaatttttttctgtttataaaattcccatctctataatctgctatcagtaatctcattgagtttgtcccaatatctatagctcctactttcattatgaaattccctcctcaataaaaacaaaaagccatccttaactgaatgacttttttattaaatcttaaattttaaaatcaatacatctgtaaacttattagcaagttttaatcaacgatttatgtctacataaactgtttcatttggttttaccatattcaatctttttcttgctatatcctctaagtctccttcatatgatttttcatctttctttaagctgtttatttgtatttcagtcttttttaattgtttatttagacttgctatttcttttttatattccttagcttttgtatactcaaatacaaatcctgtcatcatactaaaaattgatattcctaaaaataaactgataacaataatctgtcctgaaaatttttttcttaagttcatttttcctacaccctttttttagttttattttttttcttcttaggttttgattttttcttgttctttaattttttatttgattttctttttatactttttcttgttgctataaatatgtttggtatataaaatataatatcaaatagtaggtgtagtgaatagattataacgtaatacaaattatttaaaaaactgactatgtaatgtgtaacttttttaaaagaatttctcacaaaacgaattattttattgataattgataaaacaattttacttatggtgttatagtataaaataaaaccaataaacaaagccacaaaatgataatatcttaaatcaaaaaattctgtaaggtttattgttacgaatattataaccgtagctagaaaccaaaacaatacatcaaagattatagcaaaataattgatgaatttaaaattccctcttagccctctataaaaatcaaacaacacccctatgagtattccaccataaatagtagcataaaaaatgcttacatcttgagtaaaaggtatcatctatctaaatacctttttcaagaaactctcttgtggctttttaggctttgcatataccatagaatttatagttccatctatgctaattatattttcgtctatacttagcttgctcatatctaggttttcgccttcaattaccatctcgcctacagaagttttgagctctactcttttgtcattaaaagagtatatgtgctcgactcccgaaataaccagctttgatctatctttcaaagttatgttctgttccataatatccccccagtaaatatttcaataatactactattaatatactagaggactattaattttattctaaaatttcgtacatttcttttgcatcattttttaatacatgctcttttacttcatttatcttaaacttcatcttcttctctccaaattgtatttctaatgtatctccaatattcacctctgaagaagatttagcaacttttccatttatagtgacaatccctttatcacatgcatctttagcaacagttcttctttttataatcctagatacttttaaaaatttatctaatctcataattatcaccttccttggttctatagaaaaagtgtggcaaatttatccacactttttcacaagatttctaattatccatttattatatcctttaatccttttccagctttgaaaactggtgctttagaagctggtatatctataacttgctctggatctcttggatttcttccttgtctagcagctctttctcttgtctcaaatgttccaaatccaactaattgaactttttcattatttactagtgcatcttgaacagaactcataaatgcgtttaacgcagcttctgcttccttctttgttaatccacttttttctgccatctttgatactaattcagctttattcacgatatttacctcctaaaaatgtttataatatagacttctatctttgtgataaaagttctagatttttgacaaatttccttccacaattttattgttttttagcctgattccaaaactcatccatctcttcaagtgtcatgtcttctaattttttattcaagttcattgcacttttttctataaagtcaaatctatttatgaatttttctgtagtacagttcaaggcttctcctgagtctatgtctaaaaatctagctagatttactatcgaaaataataaatcgcctagctcttcctttatgtattttatattcccgaccctgtgttcgtcaagtaattcctgatattcttcttcaatttttttaaatacatcttctacattgtcccaatcaaagccgacaagtgctgctttatgttgaactttactagccttcataagagctggtaaatgttttggtatccttctaaggccatctgttatagtactttcgcctttctcttctttctttaattcttcccaagttttctcaaacttagacatatctaattttgcaccactaaatatatgaggatgtctatgaattaattttttacatatgccatttactacttcttttaaatcaaagtagccctcctcatttcctatctgacaatggaatataacctgtaaaagaacatcacctaactcttctaccatttcatctatatcattattatcaattgcattacaaagttcatatgcttcctctataacagaattttttaatgattgatgtgtttgttttttatcccattcacatccagatggacttctaagtgtattaactattatttctaagtcatgtactgtattatacatctttttagaacttttgggtatatataagctagttaaatagtcaaaaaagttttcatttctgtctaattcacaaagctttataaactttttactttctaaatctttgacacctgctccatttactatacatacttcttgattatagtcataatgttccataagttttaactttacattagatgctataaatttatcatatacctgagttattatcatgcttgtatccaagtctatatatgaattttctatttcaaaagcatctaccagtttaaatccctcagatgggtctatagccaaatagttaaacatagcgtctacaaagctcatagaaggcaatatttctactgctatgtgcttttcattggctaatctctctattatacttacagtcttctctgcaactcttggatgaccaggaacagcatacactaggtcaccctttgctgattcttctatgataaattcagatattttcaaataaacattatcaaaattttcctctttttcataaaagtagtctaaagaagtgtattgtatagtttctttaagtttatcaattattggatgtttctctgttctaaaaaaaactttagggctatttattaaagattctaacacaccttggcttataagagaatagtctcctggtccaagacctacaatacttatcttacccataacatcactcctattagcaaatttcactttatttttatattattatacaaataaggagatttactatttgtatagtatttcctttatttgcatatatattcctatattatcttataagtttaactttttttaacaatttatataatttatcaccttttggcatagttagaatctcttcttttttaattccacctattccaagtattactactacatatacaattccaccaacacatattgcaattattgtagatatgctgtttcctaagaatccaactaaagcaccataactcaacttaaccattataaacattgtcataactgttataaatggctttattataaattcttttttagaaaagtttacattcatgtgttttttaacatatagtaagttaatcatggctgccacaaagtatgctgtaactgtaccaaatgctgaacccagtacattaatatctggtatacctgttaaagtataacttattacaattttacatagcataccaacacataaagcaattacaggtactattggttttcccattccctgaattataccagtcaatgtctgtattaatcctaaaaataatacacatggagtaagagtaaacaaaatagttcctacagaagatggttcatgtggaaataaaagacccattattggtattgctaaagaagccataccaaacgcacaaggcaatactataagtaaagttaccttaactgcactcttagtatcttttctagcttttgacttatttcctaatgcatatgctttagaaattgctggaactaagctcatactcattgcagttgttatgactgctggtaaatttattgtggccattgccatacctgttaattgaccaaacattgaatttgccactttgtatgtaaatcctgcttccataagtcttcttattacaataacattatctatcatatttacaagtggcattactgatgctcctattgttataggaatggcaacagttaaaagctttttaaaaatataagacactctttcatctttaaatctttggcttgcatctatctctgctctacgctcttttctccctagcatataagcaaacaccaaataaagcatagatgctattgaacctattgtagcccctgatatagcacctgctgcaccaaaagtctgacctagactcttcataagcaagtaggccaaagtaagacctaatacaactctaaaaaattgctctgcaacttgagacacagcaatcttagtcatatcttgtctcccttgaaaatatcctctatatgcagacattgcaggaacaaatagtaatgctggagcaatggctttcatagagtataacgcacctggatttttcattacgtttgttactatgtagtcggctccaaaaaataatatacaaaatgatattataccggtaatgaataaaactgtatgtgataccttaaatatcttatttgcacctttaaaatttccaattgcaactttttccgaaaccaattttgccacagctgttggaaatccagcagtagctaatgttaaaaatagagtatacacaggataagcagcctgatagtatcccattccttctgaaccaatcatgtttccaaggggaatcctaaaaaatccacccattatttttacgattacacctgctagcccaagtataagggctccttttagaaaggagtctttatttttgttattgttcataacataacctccatactgtttatataacaaactttaatataccatatttttaatgctatattcaatattttacacaaaaacttcaaaagaccttcatgtaaaaggtctttatgataaaattattgaacttgttttcctaaaaagttagcagcaatttttaaagatttttcttcactttctgcaattgtatctttatcctttgaaacaactacaattgaacctatacagtcaccagatgcactaattataggcatgataacttgactagtatattctttttggtcttccttgaataatggtaaaatgtttttatcttttgaatattttactgttctttcacttattattgcttctaactcatcacttatacttttttctttataatcttttttaggaagcttagacacagctattatagaatctaagtctgttatcaacactccatatcctagtacttcagctaatgtttcagcatattcttgcgaaaattcatttaattcacctattggagagtattttttaagtatgacttctccatcttttgctgtgaatatctctaaagggtctccttctctaattcttaatgtctttcttatctcttttgggataactacccttccaagatcatctattcttctaactatacctgttgctttcatattttttaatccctccataaattactttaagtttatttttaccattgttaagaaaaatatacaaaaaaagctatatcttatccagatatagcttttttaagcatattactctttttttaagtcttagattgtgattttatttattactttttcatctttttctaccttagcttctttagttaatttttctatttgttcttgatatttatttttcaacagttggtcttttatagtttctttagcatcttcaaatgatgtttgctcatttattctgtctgtcactttaattatgtggtatccatattgagtttcaactaaatcagatacttcaccctttttcatagaaaaagcagcatcttcaaattcagcaaccatttgcccccttgaaaagaatcctaatttaccaccatcacttgctgaagtatcttgtgaatatttttttgctacttttgcaaaatcctcacctgatttaacttctttaagagcctcttcagcctttttcttagcttcagctttttccttatctgaaagtggcttgttattatcatctactgttttcaataaaatatgagaagcttctacctcatcttttttaaattcatctttatgtgtatcatagtattttttcatttcttcatctgatattttagtctttttagcaaagttactttgatagttttgcattgctaaatctttctcttgttggtctcttaaaaactcatcatctatacctaatttcttaagttgttctttatatttttcatctttacccatagcgtcttttaattctttaaaacttttttcaacatcctcttttttaggaagtaagttatcttttttagcttgagaatatattacttctgtagttataagttggtcaagaattaaatctttaaacttgtccttgtattttacacccttttcaacttccttatcccatatatcttttccataagtttgttccatagaatctttataaagagctatagtttttttaaattcatctgatgatatctttgtaccttcaactgttgccacagtttctcctttactagaactgcaagcagtcacagatactaccaaaatcatagctattaccaatgttattacttttttcaaatttaaaacatcccttcttaaatttacaagttattttaccttgcacatcttttctaataattcttctaattctgtaactatattataacctattttctgtttagttctatactttgttattggaactaataatatttcatcttttaattgtcttatcttttctatttttaatatcttacataacgattttatataagctattgtaagaagtgtctggactggtttaggtatatcagagaatctatcctcaagttcttcttgtatatccaacatgtcttctttgttttcaatagaagctattttcttatacatttcaattttaatcaactcatctttgatataattatctggaatgtatgcatttacacttaaatctatttcaacatcaatttcctccacaataggttcacctttgacttttttaattgcatcattaagcattttaacgtacaaatcataacctataactgccatatgaccatgttgttgagaacctaaaatatttcctgctcctcttatttcgaggtctctcattgctattttaaaaccagaaccaaactctgtaaattctctgatagcttttaatctcttctccgctatctcacttaaagttttatctttttcatacaaaagatatgcatatccttgtcttgaacttcttccaaccctacctctcaattggtaaagttgagccaatcccattttatctgcatcatatataatcattgtatttgcatttgatatgtccataccagtttcaattattgtagtacagactagtacatcataatctttatttaaaaatcctaggattatattttctaatgatttagaagtcattcttccatgtgcaacagccactctagcatctggtacgagtttttgaatcatacttgccatttcttcaatgtgttcaactctattgtatacaaaaaatacctgtccacctctacttaattctctctctatctcatcttgaattacgctttccttactctctgtaacatatgttattacaggatgtctttcttgtggaggttcttctataacactcatgtctcttattccacttaaagacatatgtaatgttcttggtataggagttgctgaaagtgtaagtacatctactgtagatttaattttctttaaagcttctttatgttttactccaaatctttgttcttcatcaatgactacaagacctaagtttggtaaatttatatctttggatattattctatgtgttccaattaaaatatctactaatccttttttagcatcttcaataatctgtttttgttgttttggtgttttaaacctacttaaaacttctactctcaaaggataattttcaaacctctctttgaatgtattataatgttgttgggccaatattgttgttggaaccaatacagcaacttgtttttggtccatacaagctttaaaaatacttctaatagctacctctgtttttccataaccaacatctccacatactagcctatccattaccttacttgattccatatcttttttagtttcttctatagcctttaattggtcttctgtttcttgatatggaaacaacgattcaaactctgcctgccaaggtgtatcttttgaaaacttatacccttgtattttttcacgttttgcataaagctcaatcaagtcttttgtcatatcttcaatttcttttttaacttttgcttttgctttcgtccactcatttgttccaagcttatttaacttaactttttctacttctgcaccaatatatttttgtactttgtccatctggtctattggcacatatagattatctccaccttgatatactattttcatataatcttttttaatagcattgactgtaatttgttcaatccctgtgtatctacctacaccactattttcatgaactacatagtctccaacacttaaatctaaaaaggattctattttctttccttttttaacttttttattgctagtcttagacgctcttttataaacacctatcatttcgttatctgttataacaacaaactttatagatttatactgaaaaccactgtttatgtgtgcaggtacaattataacttgtgaagatttaatttcaatatctctatctttagaaatggtcgtttctaagcctttgtccaataaatcttttcctaatttatttgctctttctaaggtatttgttgctaaaattattttgtatccattatatttcagccgatttaattcttctacaagcaaatctacctttccattaaatgtaggaacttctctactttcaaaatttattatagattttatagaaaagttatttatagactttggcaatagcgagtttaataccacagacttgtcttttactaagtactctaaatctgtatagtgatataacaatttaccttggtttttaatagccagacctctttcaagatttaatttataattttctctaaactcatttatataattttcgcatctttctttaagtctcgttatatcattaataaatactattgcatcatctgctaaataagtaaatatacttttgttttcttctggataaatataatctatatagttctctgcaccttcaaaataagtcttacttgatatataatctatattttgaaatgtaccttcatcagtatttttagttgtttctttttttaatttaactaatgcatctgtagttttttcgggataaataaattctctagatggagttatagagaattgttgcaatttatcaattgatttttgtgaatatacgtcaaaagttcgtatggaatctatctcatcatcaaataattccatacgaattggatttgtatattcaagtgaaaatacatcaataattccacctcttatactaaattgaccaaacccctctatttttgaaactctttcatatcccaatgaaactaatttctcagttaacttttctaagtctaagctatctcccaccttataatgagatacactatcgagcaaaacttgttttggtatgtattttcttaaaactgcctcaatagaagttactaaaatgattttttctttatttgctagttttaacaatacttttaatttctttgcttcttcgtttctgtcctttgcatccaagtgataaaaataaatatcttgaaaacctaaatattcaactttatcttccatataaaaacttaaatcttcgtatactttctttgcttctaaatcactactcgttataaaaatcatttgtcgtgataaatcattaaatatagaatacgatatatgaggtttttgtactggtaaaagtccattaaccaataatgagccttttgtattttttatacagtttattatatctttatactcttttgaattttgcaaaggatataaaaaaacatcattcatttaaatctccctctcactatccattatatttgttcatagacatatctatattttctcttattattgagtcaatagcatctgccgctttttctaatgcttcatttatgttatcagattcttcttttctaaatctagaaagtacaaagtctgctaagtcttgaccagcttctggtttagatacacctactctcactcttggaaagtcatttgaacctaggcacttagttatagatttcatgccattatgagttcctccacttcctttttttcttatacgtatctttccaacttctaaatctatatcatcatatactactactatattacttaaatcaaccttataatatttatatatatctattaatgtttctccacttaaattcatataagtttgtggtttaactaataatactttttcagtacctactctcccttcaccaatcaaagctttatgctttattttagtaacactaatattgtattctttagcaagaatatctataacatcaaatccaacgttatgtctagtcttctcatacttctttcctggattacctaaccctactactacgtacatttcttacctcctgttatataaatttgtataacaaattataataaaaattaaatatattatactctgtaaatattattaaaattgttgacaaggaaataaaaggtgtaaaaggaatttgctttcttatatctacatctttaaatattttagttatgtataaaataataaaaaacaaaaacgctaaaataaatgataaaactatcacataaaacccataattatttcccaatgcaaagcaacataagctatagagacctacatctccatagcctaatccttttgttagtttagcaataatataaggtataataaagcctatcaatagtccaaatatatgatttatataatcaaattgagctatattgaaaaaggccaaaaaaattataccttgaactattataccactaactattgttatatcatatacatatattgtgtagtaatctacaatggatataattattaaaaatggaattaaaaccatatattgtacacattctacactaatcccaaattttagatatattaatacagataaaactacagttattatgtaaataaaaaacgtattatataaatttttcttttctctatcacaaaaaacacatagagatttatttatcaaatgtgcaaaaaataaggaaattattattatatactccatagtttgtagcactttagtaatagggttaataataatattgtccttattaaatactttaattcatttttttaaattaaaactttatttaacttgactatcatctatataaccatagaaaaataaagttcaagtaattgctttccacataagattgttattaatgctccaatagatataaaaggtccatatggtataacagaattatattcctttccttttattctacttataattattacacagattccatagactgctcctacataaacgcttagtaaggctgtcaaaagaccatttttaacacccatgtaaaggcctagcattgcaaatagtttgatatctcctccacccatacactctttttttattacaaattcaatcaaaagaactataatccagacacttcctccacaaataaaaacacctagaattgaatccttaactggaatttctttaaataaaaggttaaaaatcatagaaaatatagctccaaaaatcaatattttatctggtattataaagtggtcaatatctataaatgtaattataatcagtaaagacacaagaaccaaataataaatagttgatgtagatattccatataacataaatactgttaaaaataaaattcctgtaattaattccactatagcatatctactagaaattttctcataacaatatctacactttctgccactcatcaaatagcttagcactggtattaagtctattggctttagtctagtattacaactcatacaatgggaaggaggtctagaaatagatataccttctggaatcctaaaaatacagacgttaaagaaacttccaaacactatacccactataaatacatatagattaacgattataatatccattgtagtttactccacctatcattcttgtcataaactcttggtcagtacacctactaagtgccatatcttttgtaatctttccatttttataaagttccattaaatcttggtccatagttttcatacctactttaactccagtttgtatcatgtttggaatttgatatgttttgccttcccttatcaagttttttattgctggagtagcaaacatcaattcaattgctgctattctgcctttcccatctgctgtaggaagtaactgctgtgataccacaccttcacaaactgtagataactgtgtttttatttgttgctgttgggatggttgaaacatgtctactattctatcaattgtcttagctgcccctactgtatgtagtgttgaaaatactaaatgacctgtttctgctgctgttaatgctattgaaacagtttcagggtctctcatctctcctattagtattacatctgggtcctgacgcaaaatagctctaagggctgaatgaaaactttctgtatcagttcctacttctctttgatttactaaactttgtttatgatgatgtacatattctatcgggtcttcaagtgtaattatatgtttttgttgtttttcatttattatatttatcatacttgcaagtgttgtacttttaccacttcctgttggacctgtaactaaaactaatcctttatgcttttcagtaaaagattttatactctctggaaggcctaatttttcaaatgttggaatttctgctgttatagtccttattgctattgcgtaatttcctttttgcctatatgcatttaccctaaatctttctcctgtttttagagaagctgaaaaatcagcttctccatgttcttctattactttaaaaatagattcccccgctatgtcttttgccatttgcattgttacttctgatgtcaatatttgttcacttagttttacaaatccaccttttactctagctacaggatttgttccaactgttatgtgtatatctgatgcgtttagtcttataccttgctctaataaatcataaatatacataatatttactctccatatcttctattagtttacttatttttttagtagtaaataataaaattattttattatttatttatactaagttgcttcttatatttagtttacttttttgtatgaacttatatcatgattaatcaaaattttatcttttatatcataatttccaactacatttgtatctatatttagattaaagtttacaatggcgtcaaccttatactttgaatttgaattttcttcaacacctaaaccaataatattttttttaccatctgtaacttctacttcttttattccatctttatcaccagttaccattaagcttaactccgcccctgaaccattttcttttaatttaggccatccttcttttgtcatgtcgtagtcagccttataaaaaggtatttttatagtaataccttctgttttatcaatttcttgtggttttaattcttttaatctgcattttatctctgctaaaagctcattttgtatatagtcaaaagttgttatcaaagccatattatcatatttaacaggtattttctcataagacatactttttagttgattacattggtctgatatttcatacaataactctttatactttaaaaaattttttgctgtattttttttaccactagatatattatcgcttaacttctcaaattttcttacattatttctcaaatgaactcttaaagaattaaatccttgagtttgatttggtaaaatttccaataggttttctaatgtatcccatttactattccagatatactccatactatttattataggattttgtattagttcataatattgttgagaatctggaatcccattagatacttctacttttggctcatctatatgaaacgtatgtctatactcaatcatattttgcatcgccaaagaaatgttatctaatgccttataagtatgtgaaaaggctgaatttaaatgttcattttcaattttattttcttctaaaaacattttcaaaagaatatcattattcactaactttgcctcaatcaatgtagttgagtctatatcttctttcagaatatattcatttattttactaatatctccagaagtataattcttgcaaatttctaagatagaatctctatgtgaaataatatttgcatctacatattcaatgtctctatagtccaacatatctaaatcatatagctttttcaattccatactagctttttccaagtctgaagaagctttatttaaatagaaatttatattattcatatatccaagtctttctgcttcaatatttttctcatcttgattattaaaatcttcatctgatatatttcttaattttgacctagatatggatttttcttgattttcacttttaaactcattatccattttctcaagctcatcatacaatttttcatatgctttatcaatactattttccacacatgtctctgctaaatactttgcttgtataccttcattagtagtctttgtagattttattctattagctatctgatttgaaaatatcaatccaacaatagaaagcaatgctactacaatcaaaactaaaactaaagctgcccctctttcacttttaaatttattccacttcctcaaaatctcacccccaagtaaaattatttatctttaaatatttcagttacaattttaacctcttttttacttgaatagtcattcatgcttttcccagttacagctattttatatatctgaccacttttatcttctacaatagtctttatcttatttgtaatatttcctttgtcgattaaattaccatcttcatcttttattgttgtaatcttttcatatggagtatcatataagctcacgtcaccttcactaagaactttatcatatacaactttttttgatttatctattaatttttcatatacgacagttccatcttctagtttatctaaactatcaaaatcaaattctccactttttatcttttctcttagattttctatttcactttggacatagtttaaggaagttatatctgtgtcatttttagtgtttgctttgttattagtattgataatattaaaaaatgcaaatagtacaattcccataatagccatagctactaacacttcaattaaggaaaatcctctttcactattctttttactcatattttatcaacctacttattttttaataaattcttattaccctattcttgacataacatcaaatgtataagttttgttatttaaattgctatttttatgactttcttgcactgattcattatagtatatacttacagtataaatagatttaccagtttgcttttctattttaaatggtgtttccttcatttctttattgttttgaactagtggttgattatagattatctcttctctaacttcattttctgtatcaattgtattgttttggattctcgttacagaatatacctctgtattttttttagtttctatagaaacttcatattttacaacattatctggcatctctatattgtattcataattattacctgaaccagttttagttagctctttacagttttccaaatctctatttagatacttattaattagattaatatttacttgagcatctgtaataatctgttgcttttttactgctgatgttataccattgaacactttataagaaatacttaaaactattgtcagtataaaaacagctattattacttctaataaagtaagacctttttcattatttttgtacaaactcatcacctatctttaaagcttacttagctttatttagcactagacttaaatggattatattttcctggtctccatgaagatggattatctgtatcaagtatcattgtagtattctctttagtgtacattataaatttaaatgtagcatctactacaccttctgcctttggagctacgacttctttttttgcttctttttctgttgcagctctaagtacacaagtattacatagataattagtagacctatctaaaagtttgtcattttttagaatctctccttcttttatcaatggacaatccttatataaatgccacttattttcgccttccacccagtatatttttgtatctttatttatgttcacatttttaattaaatccttattgtttgttgtttcttcctcttctttttctggttctatatatgaagtcattgtataatctagtatttgagtaacatttttttgttcttctaaataagccattaattttttgacatttctataatcacctctaacacttattgttgttgatataccataaaaatgttcgtattctttaacatttccaacgtcataactagttaagtcaatattataagccttcatttttttatctaaacctattaaaaaaagaccatcttgcatatcatataaaagatttttgcttttttcttttaattcactttcaacttcttcaagttgtttttcatattttggcataagtgcagttttctctttatatatatttaatttttcagtagcctgttttacagaattttttgtagcaatatatttctgatattgagggtaaagtccaaaataaccatatgataaaatagctaataaaattataacctttataagaatcccttttagactaacttccattttaaatatatcttttatatcttttttaaatatatctttattcattagttaatacaccttctttcaggtataatgtcatactaaatgtatagttagaatcttctgcattactttttatgctatgtaatttaacatccttgaaatagtataatccctttaatttatataaaaattgacctacataagaggaatctttagcatttccttctatatttataacatttggtatcttatcatacaatggagttttatcatctttatccgtgttattactattagtctcactatttccagttaatgcttctgacacatttgtagtcttatcttcatttaaatcattatctgttttatctccattactatcacttttcgtacttgattttgtttcattgttacttgatttatctgttgtagtcttattactttttgaattatcagctttattattagttccaagattttgataagttgttgataaacttgttagttcaactttacttggagtatttttatctatatcatccaataaattttcccactttacctttttcccaattaacatatcatatacctttatttcttcgcttttactctgtatcattttttctatatttccaatctgataatatgcagattcaatatttcttatttcaccattaacattttcaagttccttatttgctaaattatttgaaaaaattaaacataaataaggtatagcaagaatcaaaataactattggagcaattttcagtatgtttttcatttgtttagcttttatctgttttctaagtatatccattggtaaaaagtttatattttcaaaatctcttttccctttaggttctatcatacttcctaaaagctctacaattgaatttatatcatcttcatctatatctccagttatcatatcagatatatccattatctcagtaaggccttgagaaacatagcttgaaaatgcagagctaaaagtttcataaattaatttattggaatatctttttcctaatattaatatagtatccgtaaccttaccaaagtttcttgacgaatagtaattcataagaccttttgattcttctactacatttaataattgcatgtccatatctttagcagttatctttataggtatattatcactaataaataaagtatctttcttatatatatttataattgtactattgtcacttatattggttaccattatatcattgtagtctaaatttttaagcattcttaagtaagctgttgataatgtatctattctatctaatactaaatcaaattcatgcattatctctacaattgcatttacctcttccttttgtatagctccaatgataagatttaagcttgattcatcgccatctgaattatcatgtgtttcactagatacttcatacgaaaatacatattcatctgactccaaagccatcatttcgtccatctctagcttcataaatccatctaaatcctttttgtccatattaggaagtttttggggttttaaaattacatctcttgtatttaaacaaaaaactacatgtcttgattttaacttaacattttctaatgcgtatctcaatagagcatacttttccttagaaaaatcttgtgcaatatcctctattgaaaacacattaaaattttttacataaaacttatccttatcgtgtttatatctgccctcaactatggaaatagaatcgccataatatgatacataaaccttattcatttgtcctttccctcctacatggcatcatatatactaagcattggcataaatattgatacaaccagtatcgcaactataataccaactgcaattattaaaacaggctctatcattgaggccatcctatttaaataaatctcggattcatactcataaaattctgccatctgtctacttatattctctaattcccctgtctgctcccctatagctatcatctgtaccaacacagagtcaaaatacgtatatctctctaaattttctgctaagccttctcctcttgttattccatctttagctgatgctaaaatcttctctgccatggtgttatttacactatctataatataatcaagcccttgaactaatgggtatcctgttgatacaaatagatacaatgctcttgaaaatcgtgtagctaccatacaatttattccttttcctaaaacaggtatcttgtttataactctatctttatgagcccttccaactgacgtttttaaatattttttaaactgatagataaataatataataactaaaagtactattatccaaaacttcttcataaacataccaaaccccataacaattcttgttataagtggaagagttgctcctactgttgtaattgaattaatcatcttaggcaccataaatgttgtaaatataaaaatcattataaatgaagaaatcaaaactattaatggatatgttgcagcatttctaagcttttgtttaaccctgtgttcacttgcataaaatgaagccatactttttaatacttcatctaatttacctgtagcttcacctgtagctaccatagcaccaagtaactttggaaactttgattttgatgaaagcattgaatctgcaatagtagaacctacttttatttctgccactatacgattaatttcttctcttaatgtaatgttagttgaccttctagctaatgtttctaatcctgaaatactatttataccagaagatactataatagcaaactgtctacaaaagtggcttatctggtcagctcccaagtctttttttctctttctactagataatcttatatttttatttttgctttctttgatttcaataactctaagatttctctttctaagaagatttctagcttcattaaaatcgttggcttcaatcacatcagtttgcttttttccgtcctcttttattactgtgtatttaaaacttttcataatatcatcctttaatcagtcatcaaaattattctaatcatttcttctactgttgtctttccatttaaaacctttttaactatatcctcttttaagctaaccatgccttgttttctagccatctttaaaatttctctttgatttgcagatgaatctattaactcttttatttctggagtaatttcaagcatttcaaatatacctagacgtcctttatatccagtattattacacctttcacaaccttttcctctataaatagttactgattcatttacatcaataccaagagcctttttttctccaatatctgcttcatatgaaaccttacaatgctcacatatttttcgtgtaagtctttgagatattacacctaaaacagatgaagttattaaaaaactttccacatccatatctaaaagacgtgaaattgctccaactgctgtatttgcatgtaatgtacttaaaactaaatgtcctgtaagagaagctctaattgctatttctgctgtctcagtatctcttatctctccaaccattattatatctgggtcttgacgcataaaagctctaagtccgctggcgaaagtaagccctgccttttcatttatttgagattgatttacaccaggtaattcatactctatagggtcttctattgttaatagatttctattttctgtatttagttgatttaacattgaatacaatgtagtggttttcccacttccagtaggaccaacaaccaatataagaccataaggagtgtttatcaattcatcatatatcttagagccatgttcgtctattcctagtacttctttactaaccataaaattactcttatcaagaaccctcatagctatcttttcatccctgttagttggcattgtagaaaccctaaaatctatgggtttattatctacttttaaatagattctaccatcctgtggtattctcttttcagatatatttatatctgacattatcttgatacggctgattactgccttatatggtgctgagttcatcctcatatattctcttaacattccatctatcctaaacctaacacgcatgtaattttcactttgttctatatgtatatcacttgcttccattctaacagcattttctagtatgttatttactaatcgtactattggagcagcatttacatcttcttcaagtattactgtttctcttactccaccagttctatttttgttgtactcagtcattgccttatttatttctgaatgtgcataagcatgacctattgctttgtttatatcttctgtacttgatataaatatctctacgtctttaccagacatacgccttacatcttgaactgcttctctgtcttgtgggtctgacatggctagacatattttatttccatcaattttaaatggaaatacagtatatcttttgcatatattttctggaaccatctttgtagctaaagtgtctatttctgtcccttctaaaaatatactttctatatccaagagttcttttaatacacttattagtaagttactatctataagcccttcttgtactagaaattctcctagtctttttccactgtttttttgttctgatagtgcccatttaagctggtcttctgttatatatcctttttcgaccagtttgtctcctattctaacttttttagccacaggtttcactcctttactatctcaattatatcatcattcataattgaacattaaagaaaatagtataaaaaaacaggaagattttcttcctgtcttttatattatatttttcattaaatttacaatatttttataaaaatatagttttaactattttgttgagtccatcacagtattatctataagtactatatatagaactttattatctacttttgtattacttgttaatggatttcccaaattatctgctgtaacacttgtatatattttattttcacctatatcactcaataattttgctgattgtgcttctgttaatgtaactccttcatcatttgtacctatctgtaataccaatttattaccaactttaatcaatttatattttccacctatatcagctttatcaggcagagactccatataagtctctaaaacacttaaaccagtttgaccatctggtgtaactggtatcttattagtatctgaataataagataatgctgcactcttaactgaactataatcagactcaacacttgctaccttagccttgtttatattactaaataaagctggaactgccactactgctaatatacctataattgcaattactaccaataattccactaaagtgaaaccttttttattcttttttaacttcatttttattcccccttaaattttttaattaatacttacttataatatatctggttaaaaatctaagtaaaattatttaaacgtactaaccaaatttatttctaacacataaccattttttaaataaaaaaagctatgaaaatgatagtatctataaataaatacaatttcatagccggttgcaccactaactcaatatgctctaaggtgcccacattacagaacataaatcaacgtttctattttattaaattcaaaattatataactcataatgtatatacatatccacttatattatataatatctaccatattttagcaacactgtttatactatttatatataccaactttttacatattgaaacagaatttctagaaaaattatactctacaaaaaaaagaaacatctccctacaattattatatatcgtaaggagatatttataaattatcatttagttttatcattgtcatttccatcctttgctaatatttatttgaaagctaaaagctattacaatatagtattttataaaatcatctattataaacattctatctattatagttatgattcagccacaatcattatataaacgaaactcttcatttacagctatgcttattgtgcaaaattactctttacagtaatcttatataatccagaaccctctcacaaacactaaagatagaatagatactattttcaattcttataaataaactttcaatagatttttatattcactttagattgtgactgaatcatttaattattaggggttcatcttctaaccttcccattggaaacacctctttctttatttatatttacataatactacataatctgaattttttcaatacttttttgtaatattttttatattcataatattttgaataatatgccctttattaagtttattttacttaaatatacataattttaaactataatctctttttacaataatatatacctttctaacaagaaaaaaataacattccataagtataaaatcaaaaaagagttgctcaaaaggtttatatccttttaaacaactctcataaatacaataaattagaataatttacttactgattcattagagaatatcattcttatagcatctccaaataaaggagctactgtttttatctttatcttatctattcttttctcttcaggaagttgtatagtatcaagaactattaactcacttatttctgaattagcaattctttcaatagctggacctgataacacaccatgagtacaacaagcataaacatcttttgctccaaactctttaagtgcatttgcagcattaactattgttcctgctgtatctatcatatcgtctaatagtataacatttttacctttaacatcacctattaagttcataacttcgcatacattagctttcggtcttcttttatctattatagctattggaacttctccatttaaagtattagcaaattttcttgatctagtaacacttcctaagtcaggagatactactaccaaatcttctattttcttttcattaaaataatttgctaatattgttccacctagtaagtggtctaatggtatatcaaaatatccttgtatttgagctgcatgtaaatccattgttaatactctgtctgctccagcagcagttattaaatttgcaactaatttagcagtgattggatctcttgccttagcctttctgtcttgtcttgcatatccatagtaaggaatgactgctgttattctacctgctgatgctctctttaacgcatcaattaagattaataactccattaagttatcatttactgggctgttagtagattgcactacaaacacatcacaacctcttactgtctcattcatgtttacacatatttcaccatcactaaatgtacctacttcacaatctagtactgatacacctatatagtcagctattttttgtgctaactctttcgatgaattacctgcaataattttaatctcgcttccgctagtattcatttatgtaaccctcctgaaaattttaaaatactaatgaatataatttataataatttcgagctaaattttttagccaaaataataaactacataattacttactttggtcgtctttttgattctttttttctacccatccttctttgataacttgtctttctcttgctattgccaaagcaccatctgggacatcatgtgttattgttgaacctgttgctatatatcctttttcttctacaactactggtgcaactaaattagaatttgaacctataaacgcattgtcttttactactgatttaaatttatttttaccatcatagtttacaaatactactccacatccaatatttacatttttaccgacatgtgcatctcctatataagaaaggtgagatgcttttgatccatcttctataatagcattttttacttctacaaaatcgcctatttttacattatttcctaagtcactctttggtcttaagtatgcatatggcccaacattagaattttctccaaccttactatcaattatagttgaattttttatttctgtaccatcacctatttctgaatttgttatagatgagttcattccaattatacaatctgaacctatccttgttttcccttgtaacataacacctggatatattatagtatcattgcctatcataacatcagattctatataggtagagttagtgtctattatagttactccatttaccatatgagattcatttattcttcgtctcataatttcttctgcctttgataattctactcttgaattaacgcccataagttcttcaatagttgaacctgcaaatgcaccaacttttaatcctttatctctcattattttagcagtatcagttaaataatattcaccttgtgaattgttattatttagcaaatctagtgcttctctaagactctttccattaaaacaataaattccagagtttatctcacttatcatcttttcttctgaatttgcatctttttgttccactattttaagaaggtcacccttcttatctcttattattctaccataacctgttggatttccaactcttgttgtaagaactgtagcatgatatttattttctatatgatattcaaataatctcttcagtgtctcttcttttataagtggagtatctccacaaagtacaactattgtatcttcatcattaatatattctttagccatctttacagcatgtcctgtcccaagttgttctgtttgcatggctattataatttcttctgcaagcttttctttaactacctcagcttcatgtcctaaaatcacgacagtatcttttacccctgatttttttgaaacatctataatatggttaaccatttcttttccacatactttatgtataacttttgggtatttagacttcattcttgttcctttgccagcagcaaggattatagctttaaagttcattgatacactccattcaatctaatttaattttattcgtattattctcttaatcaatatacattataatacatttatctaacaatttgtatacaacatatacattatcactaataatatagcacttttttactaaaaagtacatattttaatagaaattctacatttaaaaagagcctaaatgttcgggctctctccattttatatatttattattcagcagctacttcccattgaactaatgcttcatgatatgcttgtaaaactgcatcttctaaaacttgtctcatttctgcatttattggatgagctatatctctgaaatttccttcgcctacttttctgctaggcattgctataaatagcccattatggccttctataacttttatatcatgcactacaaacaaattatcgaaagttattgaaactatacatttcatcttaccttcttctgttaattttcttactcttacgtcagttatcttcataccaaaatatccccctttgattttgacagaaattaatttatattaaaattattatcgctggaataaattaatataaactgttttttaaataattctatgaacaactagggatatcctctttttatttttacatatttttctaaatattttttttattaatcttcatctatctcaaattcaaattctgaatcttcttcttcgtctaaatcttcatttctatattcatctttaaaagtctttaagtttggttctactactattttatctccattaacatccaattgaatcaatgaaatataatcttttaccattttttctgaaggattcgttgtagatatgaatactccagtacctataacctctgcaccaaattcattcataaggtctaccattccttttatagtacctccacccctcatgaaatcatctataattataactttactatctggtttaagagcttttcttggcaaactcatactttcaactttagagctgtttccactcacatatgtcatgctaagtgtaggaccttctgatacctttatatcttttcttattataactagaggtaaattcatagcttttgcagtcataagtgccataggtataccttttgtttccattgtcacaacataatctgcatctacatactcaatatttgatgcgaatatctttcctatcttagcagctattgtagggtcataaattaggtcaatcaagtataaaaaaccaccagatagtattctagacttgtcacatattctctcacataattccattaagaactctgcattttctgctatagaagttttaggtatatattttactcctcctgctgctcctgagatagttataactttacctaaatgtagcttctcaaatacattttttacaactaataaatcttcacttattgttgattttgctgcattaaattgatttgtaaaataacttaatgtatatattttatttggattatcagacagtattttaactattgctccaattctctctgttcttttaaatttcattattatttcctcctacaagtacctttatataacgttaaactaactaatgcataacaattcttattgtggtataatattacttatgttttattatattcaaaaataaaatacatataatattatatgcatattaattataaaatattgaacattatattattataccacataaatagttcatattgtaggacttaattaaaaagaaaggtggttttattatgaatatacactttataggaattggcggtatcagcatgagtgcattagctgaaatatgtatcaataaaggttatcaagtttcaggttcggattcaaacgaatcatacctattagacaaacttagggaccaaggggcaactatttatattggtcagaaaaaagataatatatcagatgatgtaaatatggttgtttatacagcagcagttcatccagacaatgaagaacttgtggctgctaaagaaaaaaataaattggtaatgaacagagcgacttttttaggccaaatcatgagggaatataaaaattctatagcagtttctggaacacatggaaaaacttctacaacatctatgttatctacaatctttgaatatgcagacttagacccaactatactagttggtggtaacttaagtatgataggtggtaatgttaagataggtaattccaaccactttataactgaagcatgtgaatatgtagatagtttccttaattttaacccaaagatatctatagttttaaatgttgaagaagaccatcttgattatttctctggaatagatgaaatcaaggcttcttttaacaaatttggaaaattattacccccagaaggctatttcataataaatggcgatgatgaaaatattgatgacatattgtatgatgttaaagctactattataaaatacggtagagattctgacaatgatgctgtaataaaagatattcactttgacaatagtggtcatggaatatttagaatagaatatgaaggaagagatttaggagaatttgaactttctgtatatggtcttcataacatatacaatgcttcttctgctataatggcagctcttgtttctggtattgacttagagactataagaaaaaatataaaaatttataaaggtgtcggaagaagatttgaaactaaagggtattataagaatgctttagtagtagatgattatgcacatcatccaactgagttaaaagcaactttagctgctgccaaaaaattaaaaaaatcaactttatggtgtatcttccagccacatacttatactagaacaaaatctcttttaggtgaattttcagaggcattctatgctgctgataaagttatcataacagatatatatgctgctagggaaaaagaccctggagatatacattctaaggacttggttgagaaattatatcaaaacaatgtagatgccatctatataaaagaatttgaagatatagtaaaatacttacgtgaaaatgttaaggataatgatttagtaataactgctggtgctggtccaatttataaggttgcagacttgttggttgaaaaataatatataaaaataatttaggctatcaaatatctaatttgatagccttcttaaagtcttatttctttccaatttcaaatatctcatttttaaggtaatcaaataaacttgtatgaacctcatagtaagatacatttttcttagaagtaacttttacataatcttttcccattgtatcaacttttacatcaaaattatcaccttttatatttatagtaaaattatagtcacttctttccttacttttctcaggttgaacttttcctacaaccctctttgaaatcatcttatgtgctaaatcatcaaatttccatctatgaacttttttaatttcttttccatgagttatagtaacctctttccaatctttataatgacttaaaaggtcaaatgaagtatatatactctcatctaaaagtttcttaaaagcatccttagaactaactggtactttataatattcttctttatttacagtatatactctaaaaaagttaaggtcagtagaaaatttaactccatcatcagaataaccttcataaactgcttcgtaagaagaagtagtatttcttactttcttaaaatctgagaaaaataactttatttcatcccacatatcttcttcaatttttatgttttctatatttttgtctgatatataaacctttttcttttcttttatttgagtccttaaagacctattatcttcttcttctttttctaccttctttggcacttcacttttatccttttccatatttattcctattctaaaggatataaagtatattataaagaaaacaactactcctattaatattgcagcttttttctttagttttcttttcttgctcatttaaccacccctagagtttataatcataaaacaattatataactttttacacttttttttaagttttaattaattattacacttatttccttggcaattagtacatggttcaacgtgaactgttatgccttttacaaattccatatgttttattatatgtttttcaagcttggtagcaatatcatgaccttgcttaactgtcaaattttcatccacacatatagtcaaatctacatatgccatagctccatgttttctagtctttatatcaccaagatttttaacaccttctgtatctgctacaataaattttaattcttttatctcttcttcgtcaactgaaacatccatcaattcattaacagaacttataagtatactaattcctactttagctacaaatatagccactacaattgacgcaattgggtctagtggcttaaaccctaaaatagaaccacctatacctataaaagcagctactgaagataaagcatctgacctatgatgccaagcatcagcttttaaggctggtgaatttatctttttagcaacttttattgttattctatattgatactcttttatcaggattgaaataactgatactactaatggtaatattgatggaacacttaatgcatctaagttaaataaagatttaattgcctctatacctattgttatagaaacgaaaataagcaatattgataacacaaatgatactaatgtctctgctttctcatgaccataattgtgctctctatctccaggtctagaagatacataattgcctattagtactcctatagaacttataatatctgatgctgaatgtaatccatctgcaatcatagcgctagaattaccaataacaccagctataaccttaattattgttaatactacattccaaagtattgattgtattgttattttatttgcttcttcataccttgtttccatatttattcctcccttatgaaacaatctaaatattattaagaacctacatctgaacataaattaaacactctcttatatgcaaatgtatactctttgctttcaatagagattatcaatcttctataaaatgaaaaatcacctagcttaagctaggcgatatatatattatacactattatttaaatttatgcttcctttattatctccactaccattttagcagagtcatataagtcttttatagctatatgttcacttagtgtatgagcatttttcataccaattcctaaagttatagcttcgataccattcttacttaatatatttgtatcgctacctcctcctgtagattcagtatgaccttctatacctaagtttgaaaaagccttctttgcaagttttattatttcagaatcctcactaacatctattggtgtatatgctctattgacatctatctcaatttgagctccaaaatcttttgcagctttttcaaaagtctctaccatgtgtttagtttgaacatctaatttattttcttttagacttctggcttctgcaactatattaacttctcctgttactatatttgtagctgttccaccgtttataattcctatgttagcagttgtttcttcgtctattctaagtaaattcatattttctattgctctggcagctaccattatagcacttattccagcttcaggttcaagacctgcatgagcagtctttcctaatatcttaacatttattacatcttgtgcaggagcttttactattatttcacctggagaaccaccactatctaatataaatgcatattcagaatctatttttccatagtctaaatttttagctccaactaatccacattcctcacatatagagaatacaacttgtatatcagtatgttctatgttattttcatttatatatcttaagccttctaatatagctgctatacctgctttatcatcagaacctaatattgtagtaccatcactttttattattccatttgcttcatccactataggttttacccctatacctggagttactgtatccatatgtgaactaaataatattttctttccttctttatttccttttaatgtagctattatattaccagtttctccatttgctttttcaccagcattgtctattactactgaacaacctatttcttctaattttttaactaatactttagcaacattcccctcttttaaagataaactatctatctgtactaattcaagaaactcatttaaaattctttgctcgtttatcataattttcctccataatataataggtatttcaagatatattgtagtgtaatatttaaatattatcaatagtttttaaagttttgtactacatttcattaattttttcagtaaaataagaattgagtctaaattttttcatttttattatttttacctaactatatttctttgtctagaatctataaaacatagccaatatcctaaactatttgttctattatcacaagcttgatatcttaaaaatcctgtgcttccattgtctggctgttcatttctatttcctgggatagcataaatataatgttttctcttattatattcatcatactgaacaccaaataaatagtgtctgtatttatatgaatgtaaaactgcatcactatacatagtgtaattcaatacgtttaaatatcctaaataaggcattgtatatccacacagtgttgtaggatttatctctattttccaccatcttgtcttatctatataatctgttacaaaaggttttacttctttaaataatttcaaacctttttttatttgtcttggcataagtaatgtactggtttgtttatttccactctctccttgacttactccattagctctttttattttttcaatattattctgatctttttgaactttctttgatttagtaggttttgaggaaacaaacctatcttcttctctatttacttcaaaaacttcttcttcttcctcttcttcctcatcatattctatgtctatatattcttcctgtactttaaccctattataattttctatttccttataattattgaactcttctatttcctcatcaccagaatcttctacttccgttcttgcttttaactctccttcttcaatatcttcatcatcttcccaatagtcttcatactcatcttcatcatattcttctataatatattcttcttcactatcttcgtctctatcactttcctcattatcctctatctcttcgtcttcttccaactcttcatattcttcatattcttcatattcttcttcctctacctcttgaaataatatgtcctcataattttcaagcttatttcccttaaatccaattaaaggtatatttctttcatacaataatgcaataccttttatctcatcatcagaatcttctaaatctaaaacaaattcacctcttccttgttcatttaaaattatatttcctaagtctattaatccatggtcatcttttattgctactgctttatacccatctttaacatattttagattttctacatataatgcaataattgctttttcatcatttacttcaacttttgcaaaagcttttggcagtactcgttctttgtatctaaagtttatgtctttagcttctagtattatatagtctcttttaaactttcttttagaacccactgcaatccccccttaacacagtttctctaaacaatatatgttaacaaaattaaaaaaagtaccttctatttagaagatacttttgtatttattatatttgaaagaactgaaaactcttctatactaagagtttcaccccttcttttttcgtctatattagcttcttttaatatttctcttatttcatctttattaagaaaaccaagacctcccaacgaattaagaagagtttttcttctttgtccaaaggatgcttttactgttttaaaaaatatgtcttcattatgaacatcatattttcttttatctcttacatgtaaacctataactgtggaatctacatttggttgtggtataaacatatgtcttggagcttttgccacaatctctgtatcacaatagtattgaacagctatagataatgccccataatctttagtacccggaatagcattcattctatctgcaacttctttttgaaccatgactactatgtctgttacaggtatgtcttcctctaaaaatttcataactattggagtagttatataatatggaagatttgctacaagcttaactggtccaccatttaatttatcttttactaattcctgtatgtctacttttagtatatcttgatttacaacctctgtattatctaaatctgacaaggtatctttcaatataggaattaaatttctatcgatttctatagccactactttttctgctattttacccatctcacgagtaagagttcctataccaggtcctacttctatgatattatctcctcttgtgattctagctccagataagattttatcaattatattactatctatcaagaaattttgacctaaagactttgaaaatttaaaattatatttttgtactacttcctttgttgcattatgtgaagatagtctatccattatttactcctttttaacttattttgatatttaattttattaattatacttatttatatgtatttacattgatttaaaataaggtatatattataaataatttatcttaaattaaccgtaattccacaatttattttatatacatatttttcatacattaaacattacgtttagatttgttttaatgcatctataaattcttctctttcaactccataattattcaatctatttaaaaattgttttgcatttccatatccaattccaagtatttttccaagtgcatctcttctaagtgatgcttcttcattacctataagaccatttctaattaagtcaacttgcttaaattcatctcttttttctgtattttcagttctaactttattcagagctgctattatactttgaggagtagcattctcaatacctatatctccatcctttttagcttcctctcttggtagaaatgcatgtttacatcctggaacttctgatgctattttttttcttattttttcacctgcaaaatctgggtctgtaaatattataacaccacgtctttcattagcagcttttatacgctgcattacaccttttggaaatccaaatccacctgtagttataagttctgcatctattgctctcttaactgctgtaacgtcatctctaccctctactactattatttcttttatcatataaattcaccttttattcgtttttagtttttctttacatctctttattttaaggtttttatttaatttaatcaaggtactaaactatttatttttatatagaaatatgcattttaaataaatatatcaaaagagcctagatgtaaaacttatattctaggcgctttttgtactaaattttattgtaaggcttagctctctttttctgtctttccatcatatttttctatccatttatttagtatagcctctctatttcttgctgctgattttaaatcattatctatcatctgttctaatggattctttggaaatccttctggcaccggatttcccgtgtcaattgtagtaactgcaaaattcttagaatactcattcattgcatctttacttatagcccaatctaaaaatacttttgatgcttcttttatattatcttttttcacaagtgcatttgattctatctcccatccagaaccttcttttggaaatactacttctactggataaccttcaccttttaactttatacctctatttccaaaagatataccaatgggatattctcctgaagctgctaatatagctggcgctgaaccagactgagtgtatacaccaatatttttatgcaatttatccatatactgccatgctttttcttcacccataatttgtatgagttctgatactgttaaatatcctgttcctgaagaagctggactaggcatagatataagatctttatattctggctttattaaatcttcataagaattaggagctgatatgtttttagcttttaattctttagtatttactgttataccagtcatccaagcatctattccaacccaagaaggaactttcttatcatctttaaatgcaggatttaccttatcaaagcctttcggagcgtatggctctagcatttctttgtcatctaaaattatcaaacttgtagctgcaacaccccataacacatctgctttaggattatctttttctgctaataatcttgctgttatacctcctactgataatctaagtacattcaatttaatatctggatatttctctttaaatgtagctaagtatgtatctatactatcttcctcaattgctgtataaactgttaactctccttttgtcttattattagactttaagtttgaacctgatgaaacattactacatccagttattacactcaataaaagtgttgataatattcccaaagagactaacttcttaaatttcatttttacctcccttattcaacttctttttgttgccatttttatgtcttggtttttaatttttttattatcaattcatacaaaagttttactattatatttgttaaaagcactaatacttccataacagctgatggtcctatatacaacactatatcatctagctttagtttttatatcgatacggtctgagtttgaggtctataatttctttgaaatctctattaaattctacccttatatcttctggtctaattgctatcatgtttatatcatcatccataaaatctattgctcctataaaatcagctactcctagagctaacctgaacttaaataattcttctctagttaaatattcttacttccaattttaagttatccagaaacaatttaccttttatttttctctttttttataatatataacaaactgctcaaattaaaatatatatatatatctttttaataatcgctcaatattttatttactttagtttataattatttaatatcttatttactttatatataacatctatactttaataatgaaattaaaatatactattttaaactgtagtatatctatttctaaattaatctctaaaaataaaaaatataccattcaaactgaatggtatacttactctatacatttttatagaatattcacttttcttgacctatattattctcaacttatattattataataaaatctacttaaaaaaattttttctttttactccatttgtatagttttacttaactctctttttctgtcttaccatcatattttgatatccatttatttagtatatcttctctattttttgctgctgattttaaatcattatctatcatttgctctaatggctttttagggaatccttctggtattggatttcctgtagaaatagtagtaactgcatagttcttagagtattcattcattgcatctttacttatagcccaatctaaaaatacttttgatgcttcttttatattatcttttttcacaagagcatttgcttctatatcccatccagaaccttcttttggaaatactacttctactggatagccttcctcttttaattttatacctctatatccaaaagatataccaataggatattctcctgaagctgctgatgtagctggagctgaaccagattgagtgtatacaccaatattctcatgcaacttatccatatactgccatgctttttcttcccccataatttgtataagggctgatactgttaagtaccctgtaccagaagaagatggattaggcatagatataagacctttatattctggctttattaaatcttcgtaagaactaggaactgggatgttcttatcacttaattctttagtgtttactgttatacctgtcatccaagcatctatcccaacccaagaaggaacttctttatcatctttaaatgcagactctatttcttcagaaccttttggagcatatggttctaacatcccctggtcatctgcaaccaataagcttgtggctgcaactccccatacaacatctgcttgaggattatccttttctgctaataatcttgctgttatatctcctgttgatgccctaacaatatttaatttaatatctggatatttctctttaaatgtagctaaatatggctctatactatcttcttcaattgctgtgtaaactgttaaatccccttttgtcttactatcagactttgaatctgaacctgatgaatcagtactacatcctgttattacacttaataaaagtgttgataatactcctaaagaaactagctttttaaatttcattttttcctcccctatgcaacatctttttgctgccatttttgtgtgttattttttaatttctttgttacaaattcgtacaaaagtcttactattatatttgttaatagcactaatactgccatagcagctgatggtcctatatatcctatctcatctaactttagtattgatattgatgcagtctgagtttgaggtatatataaaaatattaatgctgaaacagtaaccattgaatttacaaaataatatactactatttcaagtattgatgttatagacatcggaactgttatattaaaaaatactttatagaatggaatatttatagattttgcaactaattcatactctttatccaacatttttaaagatgaatttgaggttataaaacaaactgaataaaaatgaactacatttactataactaatattgctgtacttccatataaaaaatttaatggattacttgctgagttaaaaaaagttatatatgatatacctaaaactaagccaggtaaggccattggtatcattgataaaaggtaagctgtttgtcttaatttaggaaacttatccaccttttctattatataagcactaaaaaatacaaatatagttccaaatattgctgttaaagttgatattttcaaactgcttaagtatgtttttattccacttcccaaaatacctttaaatgtatagtgttccattgtaaagcttaaattatatggccataactttataactgaacctataactgaaacgaatattaaaataaaaattagcaatgttataaaactacatactattaaaaatactctatctctaaacttattttccttaatcttatatggcatagactttgcagttatggtcataccttgtttcttacttgccatcttatctaatgtaaatgctattagtacaggaattaacattaccatagaaacagtagctcccattggtatgttaaattgtccaactacttgtttatatatgtcagtagccagtacattgtagtttcctccgactaccttagctgctccaaaatctgtaaatgcaagtataaaggatacaaagaatgaactaagtaatgagtactttataccaggaattgttattttgcaaaatttcttaaattcactagcacccaagctatctgctgcttcataaagtctataatcagccatcgaaagtgctacagataatattaaaaaagcttgtggaaatgtaaatagaatctgagaaataattattcctaatggaccatatagtggtacttccagacccatggttgtaaagattcccttatttccaaaaaggtatataagtgaaataccatataacatagttggtgcaaaaagtggaaacattcccatagttttaaaaaaatctttaaactttatatttgttcttgttattgcgtatgaatatataaatgctaaacatagtgatattaaagatgagactgtagatacaaaaattgaatttttaaatgatgctataagacttggattttcaacatatttactaaagtttgaaattcctataaaatttccacttgtatccataaatgcattttttaataatgatactaatggaaataatataaatactattagtacaattaccgaaaaaatcaagaaatatttttgtattgtgctatcacttattcttcttttattttttgatgttatcatttattcacccctagctattaagcacatccctctgatttatattgtacaattccttctttaggtatcttaaagtttattttagaacctatgcacagtttcatttgttctgcaactttggaaactacatctaatttcatttgcttagaacgatactcaactgtaattctatagttaaatcctctaaattcgatatctaaaatttctcccacttttatatccttatctttagaatctctattagactctacttttatatcttctggtctaatagctatcttattaataccatcatctataaaatttattgttcctataaaatcagctacaaaaggtgtttctggatttttatatacctcctttggcgttccaacttgtattatttctcctctattcataacaaccatcttatcagctaaacaaagagcttcttcttggtcatgcgttaccattatagttgtaatgcctagttttctatgtaaacttctaatctgctccctaagtttaagtcttacttttgcatctaatgcagataaaggttcatcaagaagtaaaaagtctggctctaaagcaatcgcacgagctaatgcaaccctttgttgttgtccacctgataattgtgatggatattttttctcatatccacttaattctacaacgtctagaacttctttaacttttttatcaatattagatttacttatgtttttattttctagtccaaaggctatgtttttgtaaacattcatatttggaaataatgcatatgattgaaaaactataccaaaatttctactttcaggtggtgaattagtcatatccttatcatttattattatttttccaccatgtttatcctcaagccctgcaattattctaagcagtgtactttttccacaaccacttggacctagtaaacaaataaactctcctttttcaatatcaatagatatgtcttttaacaccttaacttgtccataacttttacctacattttttacttgtaaaaaagacatttataatacccctcctaaagctaacctaaacttaaataaatcttctttatttaagctcttgcttccaagttcataattatgttgagaataaaatccgtggtaatctgagcctcctgtgaccactagattatacttcttagcataagaaagcgactctttttctagttctttgttgtgagatggatgatatacttctattccatctaatcctacttttaccatctcttcaatagcgctaaaattatccatttgacccgggtgagctaacacacaaattccaccagaattttttatagcttttattgcatctctgtaatccacatattttaaagatacatataccttgccgtttcctctatgaaacaattctttatatagacttgaatatatattatctgtatatcctttatctataagagctttcattatatgttgtttaaatattccagtctttgatgaatatttctttacatcttccaaagatattttgtatcctaaatctataattttatttaccatcttaacagatgctttatgtctgtcacataccattggattgcacaaattttttatttcttgactgtttaaatctatgttatatccaagaatatgaactctttttctatttttataatcataggctgaaatttctatacctggtattattgttattccataatgctctccaagcacaagagcttcatccaatccagataatgtgtcatgatttgttattgctaagatatttatattcttttctgctgctttttttattatttcttcagtagtaaaattattatctgatatacttgtatgacaatgtaactctgttagcaatttttatacctcccttttataaactgtttttccatttacaatagtatttaaaacctttggatattcactatcaatatctactaaaactaaatctgcttttttattttcttttatactacctctttcatcatatataccaactgctttagcaggatttgaggtaaataaactgactgctttatttaaattatttattctttctgcaactatacacatagactttatcatagctgatggaagataatccgaacacacaatgtcacaacaatcttccaatatagcatccattgcttttaaattgttattatgagatttacctcttacaatattcggtgcacctaaacaagttagaacacccaatttttttgaatgttttgcaacttcaagagttataggaaattcagatacatttatgcctatattttttatgaaatccattttttctaatgtatcatcatcatgtgatgcaacatttatatttttagttttggctatacctataatattagctattttattccaatctaaattatcatgcagatttactaaatcatctaaccatgtatctacataattttctgtaactccccacactttagtagcatactctttataaaatgttggatttgtatactgaccttgtcctggagaatggtccattattgataagtagtctattttattttcatctaatagttctaaaaccttttctaaaccttcataatacaacacttcatatcttaaatgaactttatgatttatactcttactatctatatttttatatgaatcaatatttttaatcatctttaaagagttatcaatacttctaactcctactccatcccctaaagatatagaatgataaactgtagttattccatttgcaggtagttttttatctagttcataaaatgccatattaaatggtaataatgtacttggtcttggctctatttccttttcaatggcatcactgtgaatatctataataccaggtattacatataagttttttgcatctattatttcatctatctcattaaagtcaaatgcgtaatcaatcctatcatttgatactttttttattgtatctccctctatgattaaatgaccattttctaaaatcatatcttctaatacaatatttgcattatgaattagttttatcatctaggctaccccactttcacttatagtcccttttgccatagtaaaggtcttatctataacagtttccataaactctatatcatgaaaaattcctatcattgtagttccttgacttttaagttccaacattttttcttttacatatattttagattgattatcaagtgatgcagttggttcatcaagtaacaaaagtctaggctttttaaccatagcttgagctaaatttaatcttaatttttctccaccagaaaaattatttggatacgcatcccataaattttcctttatttcaaattggttaagtatatcttttgccatatcatacgaacaatctttttcaaacccactctcaattaaagaatgtactaccagttcaattgcagttattcgtggaagtgtctttaaaaactgtgatacatatcctatttctttctttctaagatttatcatttctcggtctccaattttagccaggtctacattaccatatatttctgaattaaaaattatttctccagttgttggtatatatgttttatagatactttttaatatggtagacttacctgctccagatttacctattattcctaaaaactcaccttttgaaacttcaaaacttatattactacatgccgttatagtcttgttcaatgcatgtaactcaaagtctttactaaaattatttacttcaagtatagtttctttcattttattaaaaacccccattttgcttatttacaaacgatatttatagcaatgaatttataagttgctgagtatatgggtgttgtgggtcctccattatttggtctgtaagaccagactcaatcacacttccatttttcattacaattgtcctatcagcaagcatctttataacatcaaagtcatgggatacaactatcatagaaatcttaagttctctttggatttctcttattaaatccaatacttccgcttgcacagaaacatctaaacctgttgtaacctcatctaatagcaatattggagggttatttgaaagagcttttgctatttgaactcgttgttgcattcccccactaaagtattttggtttatgatctattctttctacaggtatattagtttttattaaaagttctttgcctctatctcttattttttcaacattatataaatttgccatcaataatttttctgctatattaccaccactactaaagtctaaatttaaaccaaggtggggattttgatacacaatacccataaaatgattctttatgtatctctttttttggtctgaaagctctagtatatttgtgtctttattgtaatgggatatatatacttctccactatttgcatgttcttggaaaaacagtatttttaataaagtgctttttcctgaaccagattcacctacaattccaaggacttctccttcataaagttctaaatttacattattacatgcaactatagaaccacaatacttacatatattattgctttcatatcctgtgctttcaaaacacttttcacacccatctccataaataagattgatatttcttcctattaatacttgcttgtctatattttctaatcttttagagacatttattttactcattccaagtacctcctattgtcacatctatactgttattttttaatctaactttttcacaataacttgtatctgagcaactatagtacttttcattagtgtcactgtcatatacttcatctaaaaatgtatttgtactgttacataaactacagtattttccttcaaacttttcctcttcaaacttataatcctcaaactctaaaggttctacctttgtatatggaggaatagcataaattcttttttctctacctgcaccaaacaagaataaattgtctgacatatttaatttttttatatcaaatctaggtataggtgatggattcattaaatatctatcatttactttacatggatattcaactgctatagatatatcattaaatctaactatatcttcataaagatatacccacatcctactataatcttcttctgaatgcattcttcttgtttctacttcactaggttctactattctaagggtttctggtattggtacttgaaatattagtatttgattagatttaagtttttcttctggtattctatgtctcgtttgaatcaatgtagcttctaatgtatcttttgtggtttctacattacttacacttgcaataaagctccttatattacaagcatttgtagaatcatcacttccttggtcaattacttttactacatcatttttaccaattaatgatagtgttaattgtaaacctccagtaccccatcccttagctataggcaactctcttgaaccaaagggaacttgataaccaggtattgatattgcttttaatatctttcttcttatttctttttttgtgttttcgtctaaaaaaccatagttatatatcacctaaacttacctccacaaactattttattctttctacatccgctttaaaatctacatagtgaggaagcttaaagtgagatataaatcctaatgaatctattccatctatatgaagcaatacaaattcttcatcttgtgctagtttttcactatttggctccaaagatttgtctagtatggccatagatatagccttattctcattattccccatacaaagaccatatcctaaagacatcttatttttatcttccgaattagttttagaattttcagtcttattttgtgatgcttttgaaactatttcacattcagtaaccagcatatcacctattattatttcttcatcttcatagatgggatgttttacttttataaatacattaccagttctaagttcacttatatatggatgttcatcaccaaaacctcttacaatagcataagcaaaacctgacactactccactttcacctctagtcaatgcctgtaactttgctgacctagaaactggaaatcttaaactatttcttgtaatatcatcaataacttcttccaatttgttttcacaaacttcttcttgtaataaattttcttttctaaatatattagatatttttgtaaattcagggatttcatctactgtttctaattcatttataaaactatctctaaaatctctattctttttttcatcttcttctaataattctacatttaatattctattttcatagtctctagttgccccaagatactgacctcctggtatatctttaaaagtagctgatattcttctttttattctcatttcttctgtatttatgggttctgaatatgtaattctaggcattgttgaccttaaagctcttacatagaaagaggcttctaatatatcaccttgagcttgttttatagccaatgctgatagttccttgttgtataaacttccttcagacattactttgtctacagcataagacatttgttcctcaatctgctttacatctataggcaagctatctccttttaccctataaaactcaagtatatttttagcctgtaatatggcttcttctccacctttaactgctacataagccatttctacaatacctcccaacttaattttgatgaccttggtataaatgcaatttctccttttttatctactaaaatcaaatctattcctattggataatctttatttatggtagataatctttctataaattcttctctaattccatttatatatatactatttttagattttataccaggaccactcaaatcaagctttatatacttagtttgagagtacgttgataaatcatttacttgatgtactatagttgcactttcatcaggatattcaaaagaacctattttaatctgtaatatatccacttctgaattaatatctaaaaatatataatctgattttctataatctatttgatttgacactgtaagcgctcttatattttttatatctttttgagtataattttctatatagaaggtaacttcttggtctaataaagtgattgctataccaattgctccattcaatagttttgtattattttctatatttatattatctatattatttaatttcccaggaaacgaagcactatctagcatctttctatatatttcttgtgtataatttaccatgattctcctcctatttaatccatagcattgaattgaactttcgttttattaatcaagctaaattcatcaataatctcttgttcataccttaagttctcttcatatacacttttatttatgtaattctttaactcatcaaatttactgttattgctatgtaaaactgcatctataactgctaagtaaatggctttcttattattgttttctgaaactattccgtaacccaagctttcatctacctttacactacattcagtaactaatatctctcctaaattaaatgttgtattttttacactttcattagctcttaccattactgtagccaagttaggttctttaattatagaaatacttgatgtatcttttatcattgagtatatcttttctagtttctctaagttcatatttatcaatatcttagtactatcaactgtatacaaaatttagcctccttaatctacctttcgtttacttctctttaataatataataaaccacttaagttaagtgaatattagagttgagttaattctaatgaatatcttgtaaattcttttttaacaatgttaagaaaatatattttaaaatatgaattaaacaaataaaaacaaactgtctcaaaatatgataaacttctttttcattgttgaaatgatgaaaatatatttgatttcataaaaaaagagtgcctcatgaactaaaaaactcattttgaggcactctcatcctatacttataatgacttattatatatatcattataagatttaatttgtctattttatattaaaaaatttctttgcattttcttttgtaactctacatacttcttcataacatatccctttttcctgggctatcttatcagcaacaaaagatacttgagaaggattgtttctctttcctctatgtggctctggtgacatatatggtgaatcagtctctatgaataatctttctagaggtatttctcttactacttctctagtttttttattattcttaaaagtaaccgtgcctggaattgatatataacaacccatcttaacatattctctagctaactctacatttccactataacaatgaagtacacatcctatttcaggatttttagtattctttattatctcaaaagtatctccatgtgcatctctatcatgtattattattggaagttttagctcattagctaattcaatttgcttcttaaaccactctttttgttcttctcttggagaataatcataataataatctaatccaatctctccaatagctacaactttttcattctcagttgcaagttttcttagagtttctattgctgtatcatctagttttgatacatcatgtggatgtaccccaactgctgaatatataaagtcgtattttttcgcaagttcaattgctgttatcgacgtctctatatctgctcctggatttacaaccaaatctacacctttatcttttaatgaaccaataagttcatctctatcttcatcaaaactttcatcatttaaatgtgcatgtgagtcaaataacatctttaatctccttactatttaattacctactaacgaacctcgcatccatctttagccccttgtgtaaatggtaaaacatatgggtctccatcatcacctgctgctaatatcataccttgagattctacacctcttaatttaactggttttaagttacataccactgtaacctcttttcctactaaatcctctggcttatagtattcagctattcctgatactatttgtcttgtttctggtccaatcttaacttgtgatactaataatttatttgcttttggatgtttttcacagcttattattttccctactctaagctctattttgtctaaatcatcaatagtaatttcttctttatgctctaaaggtttttcttctactggaggtttcccagagaacattttagttaattcttctatctctttttctacatctaatcttgggaataaaggttcacctttaaatacttttacattttctccaataagaccaaatgtttttgtactttcccatgtagttatatcatcttgaccttttattcctatatgttcatatattttattagcagtctcattcattataggatttattagtgttgcgattattcttatagattcacataaattatataaaactgtgtctaattcatctttcttcgtttcatctttagctagtgcccaaggcatagtttcatctatatatttgttagttcttctaactaatttccatacactctctaatgcttcatggaattgcattttatccatttcagcttcaaagttttctctagttgaaacagcttgttcttttaagtcagcatcaaaatcagttgaaacttttgctgttggtattataccattattgtatttttcaaccatagctacagttctacttattaagtttcctaaatcatttgctaaatcataatttattctcgttacaaaatttctatgagtataacttccatcttgcccaaatgcaaactctcttaataagaagtacttaagtgtgtctattccatatctttctattataggttctggataaaccacattaccttttgatttactcattttatcatcagcaaatagtatccatccatgtccaaatacttgttttggaacttctagacctaaagccattaaaagcgctggccatattattgtatggaatctcactatttctttacctactatttgaacattggcaggccaatattttttaaattcttcatcattatcagtcatataacctaatgctgttatatagttacataaagcatctacccacacataaattacatgtttttcatcaaaaggaacttttataccccagtcaaaagtcgttctagttacgcttaaatcttctaatcctttgtctaaaaagtttgccaccatttcattttttctagcagcaggaaaacagaaactatcatctttaaataactcttttaatctgtcttcatatttagataatctaaagaaataagattcttcttttactaaatatgtttctcttccacagtcagggcatttatttccttctagtaattgagattctgtccagaaactctcacaaggagtacagtatctaccttcatattcacctttatatatatcaccttgctcatatagtttagtaaatatcttttgtattatgtctgtatgtcttttttctgtagttcttataaaatcatcataagatatatccatagtattccataaggcctttatatcttttatcattccatcaagatactctatctctgacattccttgttctatggctttcttttgaattttttcaccatgctcatctgttcctgttaagaactttacatcatatccacagaaacgcttgaatctagctattgtatctgcagctactgttgaataagtatgtcctatgtgtaatcctccacttggatagtatattggtgttgttacataaaaactcggtttgctcatgttatttacctcctaattttttatcgttcgtaatcatatgattctttcatttaaataataaaaaatcgcctcctatgagttaacataggggcgagattattcacggtaccaccctaattcatctataatagttatgtttcacatgaaatgtagaaacattttatagataccttagtagactataacgtgtccaaccgttttaccctagcacacttgctcagataaaaagctccaagaccatcttcaataaagcttttgacactagctttcacctaacctagctctctgatagaaaaaacctttatttactcttcttttcatagcttgtaatttgtattactatttgtttctatataatcactatattataaaatttttcccatattgtcaacaaattatacaaatattacatagcaaataaaaacagctgctatgacacctgcaacatggctaatcatagcacatgataatgtatgtctagtattttttatcttcagacttccatagtatattgccattgtgtaaaaaatagtctcagaagaacctacaatcgtagcacccattttttctactaaacttcctattccaactctatttgcaagttcactgtacatccctaaagcaccacttccagataaaggttttacacttattagacctattaattcttttggtatactcatcatatttgctattggtgtaaatagccattctaacatatcaagacctttaccagttttgaatattcctattgccaaaaatatacctattatatatggtaggatatcccatgctgcttttaatccatcaattgctccttttacaaaactatcatacacatctatttttttatatttaccataaactactatgtacagaattattattggtataagtaagtttgaaaatatctccatgtatctacatcccctttatctatatcttctttgaaaaaatttacatgttattattgctactgctgtagatattatggttgcaaataaagtcgtaaaaattatttcacttggattttgagcccccatatccatccttaatttgattatagtaaatggaattatttgtatagatgatatattgattaccataaacataatcatatcattagtggctgtatctttcttgttattcaaagtttgaagctcactcattgcttttaaaccaaatgctgttgcaccatttccagcacccaacatatttaaagcaatattcataactatataagacattgctttatgaccctttggaatagaaggaaataatcttctcattataggatttagtttttgacctatcttttcaattaaacctgattcttttgcgatattcattatccccatccagagtgccatgataccagctagacttattgcaaactctataccttttgatgtttcacttaatataactttatttaattcacccatatttttagaaatcaagcttcctattattcctatcgataccatataaaaccatatttttcctattataatcatcctcctctttaaataattttatgatagttaggtaatactttatacttgaaagttgtactatattatgttttagtataagtgtgggagtttttacaatttttaatatttaataataattaaggagagaaataatgagaaatctaacacttcttactgatttatatcagcttactatgttaaatggctattttgaaaagaatattcatgaagacattgttgtatttgatatgttttttagaaaaaacgcttgtgatggagggtatactatagtttgtggtattgatcaggttgttgaatacatagataatcttcatttttcagatgaagatttagagtacttaaaaaacttaaatttattttctgacaagtttttaaaatttttaaaagaatttaaattcacaggagatatatatgctgttgaggaaggaactatcatgttccctaatgagccattaattactgttaaggcacctttatatcaagctcaacttattgaaacagcattgttaacaatagttaattttcagtctcttattgctactaaagcctctagagtttgctttgcagctcaaggagaccctgtatttgaatttggattacgtcgtgcacaaggtccagatgcagggatatatggagctagggctgctgtagttggtggttgtgctggaactgcaaacgtactagcagggaaaatgtttgatatacctataattggtacacaagctcacagttgggtacaaaaatttgataatgaacttgaagcattccaagcatatgctgatgtttatccagataaatgcctactacttgtagatacttatgatgtattaaacagtggagttcctaatgcaataaaagtattcaaaaatatttctgaaaaaggatacaaacctatgggtataagacttgactctggagatttagcttatttatctaaagaagctaaaaaacaattagataacgctggcttttcagatatcagcatcactgcatctaatgacctagacgaatataccataacatcacttaaagcagaaggagctactataaattcatggggagtaggtacaaagctcattacatctttcgattcaccttctcttggaggagtttataaattagctgcatcttgtgaaaaaggagttcttgaacctaagataaagatttctgagaatccagaaaaaataaataatcctggttacaagaaagttataagaatatataacgaagacaataaggcagaggcagatttgattatgttacatgatgaagttatagatgagtctaaacctttagaaatcttccatcctacttatacatggaaaacaaaggtatttacaaattacaaagttaaagagcttcttaaaccattgtatataaaaggcagatgcaaatataataaaaaagctgttcttgaaataaaaaatcatgtacaatatgaattaagtactatctgggaacaatacaaaagactttcaaaaccacacatttataaggttgatttatctagaaatctttggtatttaaaaacacaaatgatagattctaaaaaagttttatagtattaattatttttatttaagggggactgtttatttatggatgttacagattacagaatcatagaaattttacaggatgatgggagaatttctatgaaggacttaggaaaaatagttggtttaacttctcctgcagtttcagaaagagtcaaaagattagaagagtctggtgttatagaaggatataaagctattgtcaacccagattcattaggcagagttataaaggcatttattcatatttctcttccaagcaatggatatacagaatttattgagtcagctgcaaaggaccctaggattgtagaatgtcaccatataacaggtgatgattgcttacttttaaaagtaattgtaaaagatatgtacgagctagaaaatgtgattgatactataaagaaaattggttctactaagacctctgttatactatcaacgccaatacaagcaaaatcaatattgtaatataaattaaatactaatggtttattaattaatagaccattaagtatccttaataaaatttcaatttttgatataaaaaaagttgtctttcataattttacaacaaagacaacttcttttatgtttttgaaatccgtatatttcaaacttcaattaatcatctaaaactcaattatattaactaaatttatacatgtgtataattactcttatacaagtaatttgttaaaatatattccatatatgtctttaacacactgacttctccactcttgcccaataattttactgtagacactatatctgcatacccaagcattattacacctatagtgtcctcatctactaagttaaatacattaattaattctttcctactcaaatcatttttcttatatagagacaaaagtatcatatgatatcttacatatttacttataagtctatatgtctctgttgataactctaactttattcccatattgtcaattatttgagcacctattttttcatgatttgtgaaatgaactcttccggtttcatctaaggtcatactatcaggcttacctatatcatgtaaaaatgttcccaactttaatacatgtaacttatttattccttcttcaatatatgtgtttaaatagtttgacacatgttttcttagatgtattggaaaaaaatccttatcatttaatactatttctaattcttttaatgcatttatagaatgttcaaaacaatttactacatgatatttacattcacctacagacttcatacagcttattttaggaattattttttctaattcatgcttattatctaattctataaatattttatgtgtatcttccctctttaaactctctattataattttccctatttccataaaatcacctcagattcaggttttataaatctaaaacttgtttataaaccacatctttctttaactttctatctttacaaactatttttattgcatcttttttgttcataccactttcaattagttttaaaacatattccctatctgtaagcccatcataattttctttctttgacttctcaccatgaaaaccctctactattaatacaaactctcctcttacttctttttcctcaaatatttttatggtagtttctatattttctcttattatttcttgatatttttttgtaagttctctatttatagaaatattcctattaccaagaattttaagcatatcttttagtgtatccttcaatctatgtggtgattcatagaaaattatagttctactttcttcctttaattcttccaattgtgctttcctaacttttttatctctatctaaaaagccctcaaaaacaaatctatgtgtgtccataccagagccaactaaagccgttacaaaggctgttgcacctggcaatacttctatctctatgttattttgtatagcttgttttattatctcttctcctgggtcagatataccaggcatacctgcatcacttatcagagctatattttcaccatcaattagtttatttatcaaataatctccctttgaatccttattatgttcatgataactagttagtggttttgagatttcaaaatgatttaaaagttttatactatgtcttgtatcttctgctgcaatcaagtctacttcttttaatgttcttaaagttctatatgttatatcttctaggtttcctattggtgttggacatatgtacaatttcccactcatttacaactctcctatatctttattattatatattgcttttaattcttttgtataattcccatcttctccataaacatacaatgggtccaatattttaagctctggtcttccatcttttacaaattgaaccaaaactaagttcggtgctttttgaggtcttggatgcacaaattgaataacctttggttctaatttatattttctccctaaagttattatatcaaccaatcttgttggtctatgtatcatgaagaattttcctctaggcataaccaatctggatgaagctctaattacatcttccaaattgcaccttacttcatgtcttgatattgcttttttatcatttggattttttattccatcaatatgcatatatggaggatttgatgtgactacatggtaaccatttatgtctaagactttgtctatgtattttatatcttcatttataatctcaactctttcttctaatccatttaattttatagaacgagttgccatttcatatacatcttcttgtatttccacgccaataatttttttagcttcactttttccagctatcaaaataggtataattccagttccagtacccaaatctactactttggcatctttttttattttagtaaaattggctaataaaactgcatctataccaaaacaaaaaccattagtatcttgtataattttaaggccttttaattgtaaatcatctattctttctgaatcttttaattgcatatataaattctcctcaaatattaataactttaagcattaattgctttaaaaaaggtaggaaaagccctaccttaaatttaatcttctaatttctttagctctcttagtgtggcttcatctaatccatcattatccttacatttaccaccacagccatcacattttttaggctctctaagtatttttatatcttctcttgtgtatatctttactgtcttgtcttgaaattccactttaatttgttctaataaaggattcacttctacaacttttccttttccatcatctgattgcaccaatgcacctacaacaggcattttttctattgcttcactatatacatcatgctcatattttaagcaacagaataatctcccacatattccagatatttttgttggatttagagatagactttggtcttttgccatttttattgaaactggttgaaaatcacctaaccaagatgaacaacaaagttttctaccacaaggccctagacctcctatagatttagcttcatctctgacacctatttgtctaagttctattctagttttaaatatagcagctaagtcttttaccaattctctaaaatctattcttccttctgctgtaaagtaaaaaatcaacttattcctatcaaacgtatactcacaatctattaaaaacattgttaactcatgttcttttattttttgttggcacaactcaaaagtttcttttgccttttccttattttctagatatacttttttatcttcttctgtagctattcttataattggcttcaaaggagaaactaattcgctttcatccatatcttttggaccaacgactactttcccatactccaagcctcttgcagtttctacaactacatccatatcttgctctatattaaaatcaacagggtcaaaataatatattttcccagcacttttaaaccttatacctactatctttatcatttaatcacctcgtatatatttaaagacataacttgtatgcttatattgaaattgcaattgctttttattttactctttgcatcttctattatatcaataatcttggacaattgagaataactaatttttccactcatattttgaatgaaaactagcttatctacatttattaacatgttcttgtttacattttcttttaataggatgatatctcgaaaatagtttatcatcatatctaataaagctataatcttacctctatatttttccatattgtttggtatatttaaaatctccactatgtttttatctaacattatctgaatatactgttgtatatcttctctcatcattgaaaactcagaagactgagatagatttagagcattctcaatacttcctctcgaaaaaatagccaataattgagctctttcttcttctatacctgtatttatcaaataacgttttaagtcttcaattggtataggtgagaactttattatatcacatctagattttatagtttctaataaagattccttgttgtttgtgactaagattattatagcatagtttggaggttcctctagcgtctttaaaagtgcattttgagcttccacagtcattttttcagcattattgattatatatattttatagtctttatgaggtcttattactatatctgattgtaaatttctgatttgagctatttttatactatttccatctggttttatgagtacatagtctggactattttcgagattttcataatcaagtaatagttttgataattcatctgcaaatttcttttttcctattccatccattccttcaaacatatacgcattattaagtttatttttctttatagaatttgttaaatatttctttgcaaaatcttgccctataatattttcaaaatacatatttatctctccataggttttattgaatcaagaactattttataaatttcattatgtatactttcaatacttcttaatttgttatctaaaacacaatttatttttttccaatcatatttatctgctatatataaagcattgttgtaagatttctctaaatactctatgtcactttcatgaatatcctttttttcttcccctgtaattttattttttctattctccataagctttttactaaattcaataggcacatctaaaaatataacacaatcaggttgtggtatcttaaataaattaaattcataatcagctaaccaatttaaatactcttctctatcacaaatatccattttagaggcctgatgtaccatattagaggttgtatatctatctgcgataattattccaccttcattgtaaaactcctcccaatcggttttaaatgatgcatacctatcagctgtaaaaaaagttgatgctatatatgggtctacatctgatgcatttttaccaaagtctccttttaggtacattttcactaaggcagatgatggagattcataatttggatattctacctttttaatcatatagccttctttttttaatctttcatataatatttctgtctgagtagcctttccacttgcatctgaaccactctctataattattaacttacctttcattttcatatcctccatacaaacactttttacttttttagtacttttattagatagctctatataagcagtctatttatttctcttcacaattttaaactatctacttctatctacttttatatcataatttttaaatgtcttctaaatctattacttgtataaaatttaaatctacatctttcaatccactcacaatcatgcctttagaatgacaaaacattagatagtctattatttctttacttattacttcaccaggagatattacacttattccaggtgggtatggaactatacattcaccacaaattttacctatgctgtcatatattttaacactttttttagttttataaaatgcttctctaggtgttaatattttctttggaataacaacagggtattttttattttctaacttttcaaatttaaagtcttcctttacaacattgtttaatgctgtttctaaactagagaaatcctcagcagtatttcctattgtacatattaaaagaactccataataattagataactccacttgtatgttatatttgtttctcaaaatattttctagttcataacctgttaaacccatgtttttagatgatataaatatttttgttttatcatttgtgtcatatatattaatatttgaatcaactttatctttgaaaattctaatattatttaaaagctcttccattaattcttttcctttattttcatatatatctactgctaattccagagaagataataataaatatgaagggcttgaagattctgtaattcttaacatgttcaatattttatctatatcaactcggtctccctgtatatgtatcattgacgattgtgtaaatgctggaagagttttatgtgtactctgtacaactatatctgcaccttgctcaagagctgttttaggaagcctctcactaagccctaaatgcgcaccatgtgcttcatctactatcactaccatctttttgctatgtgcataattacatatgtattctaaatcatatgtcattccataatatgtaggataagtaagcagtactgcttttgcatccaagtttttatctattatatcaatcacattacttatagatatcccttttaagacatttgtctcttcacttatctcacaaggcacatactctatatctatatctcctaaaatacatccatttataacagactgatgacagtctctatttgttattattttacttttaggactacatactgacattattgcagattgtattccacagctactaccatttactaaatagcaagtataatcacttttaaatactcttgatgcttttttttgtgaattttttataattccttccggaaagtgtaaattatctgttcctaatatctcagttgtatccattttatacaaattttttagtatatctttatatcctaactttttataaacctgtccctttttatgaccaggcatatgaaaagatattacttcttcatttacaatcttatttaattcattaataataaacatatattaatagtactccttttttacataatacttctttttaaaacttcaattcttatctattttaccattaaaaaagaaacaaattaatatttttataaaattaaatacctcattctaaacatttagaatgaggtatttaacataaaagcataaattattctctatcatcagacattaaacttggtattaagtataatccagctaaacctacaatgaagtatattattctacttaccatttcatatgttccaccaaagatactacctattaagtctgtacctagaataccaattgcaccccagttaagcgcacctattatagctaaaattaaagcaacttttttcacttatatcactcctcaagaattaaatttttataaagtccataattcctgtgtttagttttcccgaaatgaaaaaataaatacgtattttttgttttttttgacaaaaaataaaaaaaattacgtggctacgtcctactctcccaggcagtttcccaccaagtaccatcagcgctagagagcttaacttctgtgttcggaatgggaacaggtgtatcctctctgctattgtaaccacataatctttatgcttaatatttctattaagtttttaataagtttatagaacctagtaatactagtttctttagagttagcactctaaaaactacacatatatcttaatgaatgaacatcaaataaatattggtcaagtcctcgacctattagtatcgataagctaaatacattgctgcacttacaccttcgacctatcaaccagatagtctttctggggtcttacccttgcggtgggaaatcttatcttgaagttggcttcgcgcttagatgctttcagcgcttatccattccgtacatagctacccagccatgcccttggcagaacaactggtacaccagaggtacgtccatcccggtcctctcgtactaaggacaggtcttctcaaatttcctacgcctgcgacggatagggaccgaactgtctcacgacgttctgaacccagctcgcgtaccactttaatgggcgaacagcccaacccttgggacctactacagccccaggatgtgatgagccgacatcgaggtgccaaacctccccgtcgatgtggactcttgggggagataagcctgttatccccagggtagcttttatccgttgagcgatggcccttccacgcagaaccaccggatcactaagtccgattttcatccttgctcgacctgtatgtcttgcaatcaagctctcttttgcctttacactctacgtacgatttccgaccgtactgagagaacctttgagcgcctccgttaccttttgggaggcgaccgccccagtcaaactgcccacctgacagtgtcccaagaccagattcatggcctatggttagagtcccagtactacaagggtggtatcccaaggatggctccgccaaaactggcgtcctggtttcaaagcctcccacctatcctgtacatgtagtaccaagacccaatgtcaagctacagtaaagctccatggggtctttccgtcctgtcgcaggtatccggcatcttcaccggaattacaatttcaccgagtctgttgttgagacagtgcccaaatcgttacgcctttcgtgcgggtcggaacttacccgacaaggaatttcgctaccttaggaccgttatagttacggccgccgtttactggggcttaagttcactgcttcgattgctctaacagatccccttaaccttccagcaccgggcaggcgtcagctcctatacatcgtcttgcgacttagcagaaacctatgtttttggtaaacagtcgcttgggcctattctctgcggccacctgatggtggcaccccttatccctaagttacggggtcattttgccgagttccttaacaacagttctctcgctggccttaggatactctcctcacccacctgtgtcggtttgcggtacgggtacctttaacctcgatagagacttttcttgacagtgtgaaatcagctacttcgctactaaatttcgctccccatcacatcccagcattatcaaagcggatttgcctactttgactgcctcaatgcttgggcacacataaccaacagtgtgcttagcttatcctactgtgtcatcccttctctcaaacggttatcggtagtacaggaatatcaacctgttgtccatcacctacgcctttcggcctcagcttaggtcccgactaacccagggcggacgaaccttcccctggaaaccttgggtttacggcctgtgggattctcacccacatctcgctactcatgccaacattctcactcccatactgtccacatgtccttacggtcatgcttcaacccgtatgggaagctcccctacccatcattactgatgccgtagcttcggtagtaagttttagccccggaaatcttcggcgcaggatcactcgaccagtgagctattacgcactctttgaatgagtggctgcttctaagccaacatcctggttgtctgtgcaatcccacatcctttaccacttaacttacatttagggaccttagctgacgatctgggctgttgccctttcgactatgaatcttatcacccacagtctgactcccaagtataagatgacggcattcggagtttgatagtcttcggtaggtgcaataccccctaggacattcagtgctctacctccgtatctctcaccttgaggctagccctaaagctatttcggggagaaccagctatctccgggctcgattggaatttcaccgctacccacaagtcatccccgagcttttcaacgctcgtgggttcggacctccacgaaattttactttcgcttcatcctgctcatgggtaggtcgcccggtttcgggtctacgtcaagtaactgaacgctcagttaaaactcgctttcgctacggctccgcaccttaagtgcttaaccttgctacttaacgtaactcgttggcccgttctacaaaaagtacgcggtcacacaagaaatgtgcttccacagcttgtaagtgcagggtttcaggttctatttcactcccctcccggggttcttttcacctttccctcacggtactatacgctatcggtcactaggtagtatttagccttggagggtggtccctcctgcttcccacagggtttcacgtgtcccgtggtactctggatcatatctgaagtcttctcgtttaacatacaggactattaccttctgtggtgggtctttccaaacctcttcaattacgatacctcttcgttatgatatgtccgcaaccccaataaagaaaactttattggtttgggctaatccgcgttcgctcgccgctacttacggaatcgaatttctttctcttccttcaggtacttagatgtttcagttccctgagttcccctcattaagctatgtattcacttaatgatacttagacattactctaagtgagtttcctcattcggaaatcttcggatcaaagtttacgtgcaactccccgaagcttatcgcagcttatcacgtccttcatcggctcctagtgccaaggcatccgccctgcacccttaataacttgaccagttaaaaaggtttgatagattagaagctatcaacttcgataattttaaaaagttatcagctttatatattacaaattagatgtcatatcactaaatatatatgcagttttcaaagtgctaaagcacggcgccaacggataaatcccgttgctaaaagtgctaattttgagtattcgtaaaaacgaaccctcaaaattaaacagtaggtaattctccttagaaaggaggtgatccagccgcaccttccgatacggctaccttgttacgacttcaccccagttattgattccaccttcgacgacttcttccaaaaggttagataatcggcttcgggcgtctccaactcccgtggtgtgacgggcggtgtgtacaagacccgggaacgcattcaccgcagcattctgatctgcgattactagtaactccagcttcatgtaggcgagtttcagcctacaatccgaactgagagtagctttaagggattagctccaccttacggcttggcaaccctctgtactacccattgtagcacgtgtgtagccctaagcataaggggcatgatgatttgacgtcatccccaccttcctccaggttatccctggcagtctctctagagtgcccaacttaatgatggcaactaaagacaagggttgcgctcgttgcgggacttaacccaacatctcacgacacgagctgacgacaaccatgcaccacctgtcaccaatgtccccgaagggaactctccgattaaggagatgtcattgggatgtcaagcttaggtaaggttcttcgcgttgcttcgaattaaaccacatgctccgctacttgtgcgggtccccgtcaattcctttgagtttcactcttgcgagcgtacttcccaggcggagtacttaatgcgttagctgcggcaccgaagggggtaacccccgacacctagtactcatcgtttacagcgtggactaccagggtatctaatcctgtttgctccccacgctttcgtgcctcagcgtcagttacagtccagagagccgccttcgcaactggtgttcctcctaatatctacgcatttcaccgctacactaggaattccactctcctctcctgcactcaagtctcccagtttcaagagcttactacggttgagccgtagcctttcactcctgacttgaaagaccgcctacgcaccctttacgcccagtaaatccggataacgctagccccctacgtattaccgcggctgctggcacgtagttagccggggcttcctcctcaagtaccgtcattatcttccttgaggacagagttttacgacccgaaggccttcatcactcacgcggcgttgctgcatcaggctttcgcccattgtgcaatattccccactgctgcctcccgtaggagtttggaccgtgtctcagttccaatgtggccgatcaccctctcaggtcggctactgatcgtcgccttggtaagccgttaccttaccaactagctaatcagacgcgggtccatcctgtactggctcacctttgatattcaagagatgcctctcaaatatattatcccgtattagcatacctttcggtatgttatccgtgtgtacagggtaggttacccacgcgttactcacccgtccgccgctctttaccgaagtaaatcgctcaacttgcatgtgttaggcacgccgccagcgttcatcctgagccaggatcaaactctcaaataaaagtttatcaggctcagatactattgttatcaaaatatctggctttatggtttgtttcttgttttataaattaacctactgtttaattttcaaagttcattttttatgtttgcccttttcttaaggacaagtaatactatatcatcttaaaaatatttcgtcaatactttttttgttttttattttaaaaaaggttataacttttggtttttttaataaatataattaaaactaatagatataacccttgatattacaaacaatacatgcatatataattttacctattttgcaattttattttcataagaatatgaattagctctcactctatctgcccaaatatttatactcttaactttattaacattagttgtaccctcaaaaatatccattgcatccttacaaaaatatatcataacatcaagaaccaaaaatccaacacaaaataaacataaaaaattaattacttgaaacatcagacattcccccaataattttttatatatagtattctcataaattattctttttaccttctcataaattattctaaatattttcataataaattactttcaatcatattttctaaatataaagtctcaatcaacaaaaactaatatcaatttctaacgtttgttggtaatttataaattaaatatctaaaagaatctttgaagcatataaaaagcattctacactgacattttaaacaaaatttagctatttattgctaatttaatagctaaactttatttaaaacttagtagaatgctaatatttcttagttttcttcttctttatttggattgttatcaataggtttcatagtcgggaataataatacatctcttatagatggagagttagttaataacataattactctatctatacctattcctagtcctcctgtaggaggtagacctacctctaatgcttttaagaaatcttcatccatttcaaaagcttcatcatcacctaattctctttttctcaattggtctataaatcttcctttttggtcaatagggtcattaagttcagaaaatgcattagctaactcccacttattagcaaatgcctcaaatctatcagttcttcttgggtcttcaacatttctcttagataatggagatacttcaactggatgatgagttataaatgttggttggattaatttatcttctccaaattcttcaaagaaagcatttattacttctcctcttctcattccaggttttatctctatacctttttctctagcaacttctagtgcctcttcatctgtatttatagtagaaaaatctacaccagaatattctttaacacaatcttccatactcattcttttccaaggtggtgtaaagtttatttctgttccttgatagttaactatcatacttcctgtagcaacttcagccatatgtgcaataacattttctgttatttccatcatatcagtatagtctgcatatgcttgatataattctattgcagtatattcaggattatgttttaaatccataccttcatttctaaacattcttcccatttcataaactttatcaaatccaccaacaataagtctttttaaatacaattcatttgctattcttaaatacattggtatatgtaaagtattatgattagttataaatggtctagcatttgccccacctgctatagtatttaatattggagtctcaacttctaaaaatcctctatcatctaagtatgctcttaatgcttttaatgcttttgttctaattaaaaaagcattttttacttctggatttactattaagtcaacatatctttgtctatatcttagttcttggtcttttaatccatgatatttttctggtaaaacttgtaaagatttacatagtaatactacagatttagcctttacagatatttcaccttttttagttttaaagatttctccttcaattccaactatatctccaatatcatatgttgaaaatacactatattcttcctctcctatagcatctagtcttacataagattggattcttccctcttggtcttgaatatctataaagccagctttcccttgtattctcttgctcattatacgtcctgctatttttgtagttttaccttcaagagaatcaaagttatcttttatatccatagaataatgagttctatcatatctactttctttaaaaggatctctacctgactcttgtaatttttttagtttatctcttcttacttgaagtacttcactaaggtcttcttgaatttgcgcttcttcattgctttgttgattatttttcatttttttcctccaaattatcttcttatttctaatatttcaaacttagcaactccatcaggaacttgcacttccacaacttctttcgcagctctacctaaaagtgctttccctacaggagattcgtttgatattttaccatcatatgggtctgcttctgtcgaaccaactatagtatattcaacctcttcatcaaattctaaatccttaactttaactattgatcctattgtaacaacattaaggtctattttgctttcatctatgataacagcttttctaaccatattttctaattttaaaattctttcttcaacttgtgcttgttcctttttagcttcatcatactcagcattttcagataaatcaccaaaagatatagcaacttttattctctctgcaacttcttttctctttacaacctttaagttttctaattcttcttctaatttatcatatccctcttgtgtcaataaaaactctttattttcttccattataaatacaactccttcacaaatttcttaggaattttcctaattatattttaaaaattttataatctttttttaatttatgcgctatattataagtcactattatttttatgtcaaggagtcttccatatagtactccaatttcgacacaacttcttgatagtcttctattttgttaatttcatcccttaattttgcagagtttctaagtccttttaaataccaagcgatgtgttttctcatttcccttacagctacatactctccatgttcttctactgcaagttttaaatgcttaatggcagtacttattttttcgttaagagttggctctggcaaaatctcgcctgtattcatataatggtttattcttttaaatatccaagggttaccttgagcacccctacctatcattatagcatcacaaccagttttgtctaacatatttattgaatcttctattgtaaatacatcaccatttcctataacaggtatactcaaatttttcttaatctctgcaattatatcccagtctgctttgcctgtataaaactgttctctagttcttccatgtattgctaaagcgcttattccacaatcctctgctatctttgctatttcaacagcatttacactattatcatcccagccttttcgaatctttaaagtcactggcttttttgagttcttcactactgccctcaatacctcttctgcaagcttaggatttttcataagtgctgaaccatctccatttttaactacttttggagctggacaccccatatttatatcgagaatctcatttgaataatcattcattatctctgctgctcttcccataaactctggttctgaaccgaatatctgaactgctacaggatgttcttcctcttctatcttaagcatttttttagtattttcatcatcatagcaaagtgccttaccatttatcatttctgtatataaaagcccacatccctgttctttacaaattaatctaaatggaaggtctgttacacctgccataggtgatagaaaaactttatttttcaattctaaatttcctattttcattgtttttctcctatttttgcctttattttgtgatttaactttaaattcttatttcctcattataatataccacatatagctagaaatctatcataaaaagggaattggatatataacccaattccctgtatattaattattcttggtttttttcatatattattctcaatccttctagtgttaaaaaaccatctacataatctatacttttcgtctctgaagcaatcagtttagctaatccacctgtagctataaccttaacatcatcacaattcaattctttcttcatcatacttattattttgtcaactaaaccaacatatccataaattattccagattgcatggctgatacagtactcttacaaatagtcatacctggcttagctaattctactctaggtaatttagacgcactttgaaataacgcctcactagatatttttattcctggtgctattgttccacccaaatattcacctttttcagagatagcacaaaatgtagttgctgttccaaaatcaacaagtatacttggtgctccatacttttctatccctgctacagcattaactattctatctgccccaacttgttttggattatcatattttatatttagacctgtttttatgcctggacctactattaatggctgttttttacagtactttatacaaaagttttcaagagaatgcatgacatttggaactacagatgatattataacatcatcaatatcacttatattcacattatcataatcaaataggttacttatcaggattccatattcatcagacgttttttccctatctgttttaattctccagtaattaactaatttgtcacctttatatatacctaaaaccatattagtatttccaacatcaaatactagaagcatatgtcattaaccttctttctattttttgcttttcttaagtacagtggcaacagcagctactactaaagcccctactattgcttctggcaccccatttgctgcggcaagagccattattacttttcctgctgaaccacttttacccattgcatgaagatacttgtcagcatataagacatatatcattcctaaaactccagctgtatttaacagagaacctattgcccctgtaattaaacctgatatgtataccttatttgtagccttaattattaactgatatacataataagctaatacacctatcataactcttggtaatattgaaactaatggatttataaaaacaaaagatgttactgttgggtttgttatagcatttaagagacttgatatcccaaatataaatcctattgctgccccaactattggtccttccataatagctccaataataactggtatgtgcattatagttgcttttgtaggtccaactggaataaatcccaatggagtcatagatagcataatagaaatagctgatagtactcctattatagtcatctttcttacatttacttttcttactgatgcacttgtgttcatcataaaaaatacacctccgttccagctcattaagatgccggactacttaattttttaatttttttcgtttttttcttataactatgagtcaagctaccattgtaggatgcccgctctaacaagaataattttatcaagatgagttgccattgtcaacaatttgacaagaaaaatatgctaatttcatcatatttctcgtttttttactatatctttatatgccattatattttctacactatccgctttttttactgcatttattatacttttttccacaacctctacagccaatgaacctactaatgttatatctgcttctatttctcctgttgatattgtgaatattgtatctccatcatgaggtgtatggataggaaaaatagacttagcatatccatcatgtcccatttgagatatctttttacatccagctttggttaacttagcatttgttgcaattatcccaattgtagtattatctacactaaatccacctttactttcaccttgtttcattaatttatatgtatcaattgtttctgtctttttatcatttaaagcaccagctataaccttaccattttcataaacatctccaagagcatttacagcaattaatgcagatacaattagaccattatctaattttatagaatagctacctattccgcctttcatagcatattcctgacctcttatttttccaacagtggctccacaacctgctccataatttccttgatttaaaatatcagtatttgcaacttcacaagctctataacccatctttaaatctggtctacatttaaagctccctactcctaaatcaaataaaactgctcctacaactataggcactttacctacacctacatcaaagccaattcctttttcttctaagtatctacttacaccacaagtggattcaagaccatatgcagaacctccagccaaaactactgcatgaactttttgaaccatatttacagggtctaataaatcggtttctctagtccctggagcagaaccccttacatcaacaccgcaagtagctccttcttcacatattactactgtgcacccagtaagaccatttctatcctcaacctgcccaacctttaagccttctatatccaaaatattattatacatatcctttttctcctcttatagaaacttcacctgaaataatttcttttatacttccatcacttctttgaactaataaatttccctcttcatttatgtctaaacatttcactagttctctattatctccttttaatacatatatatttttatctataattgcagaataatctctacatatttttaaggttttttctttggaattatttacagtataatctaaatataatttttcaaattcagtcaatacattcctaacaatatctactctggataacatatacccttctttatacaatgatgtggctttgtcagctatttcttgttcaaaatccattattttaacatttattccaattccaagaacaacataatttgttctttcaatttcagcagataactctgttaatataccacatattttttttccatttaaaataacatcatttggccattttattaatgtatttgctcctagattgtttaaagctttcgttacacttgctcctgctattaaagttataaatggagctttgaatggttccatatctggttttaatataatactcatccagattccttcatgagtttttgaatcccatcttcttcccaatcgtcctttccccatatcttgatgttcacttaaaatcacagtcccatctacactatttatagctatccttttagcatgttcatttgttgaatctatagtgtcaagatgttcaatattttttccaataaactctgtatctaatttatagtaaatattctgtgggcttaataaatcagttggattttccgctaatcgatacccttttttatttacagattctatattatatccctcttcttttaaggctttcatatgtttccatatagctgcacgtgacacccctaattgttttgataattcttctcctgaaataaattcagatttattatttaatataatctctattattttatctcgcatatttcacctctaatatgacataatttcatgacttattttcttctaataaataattatacattattaatatacttttaatactattaattttaaatttcctttttaattattataatggttgttttatattttatattgatgatttatataattttacattttatttaaataattttaaaataataaaaaactgaaagtatcaattaaattaatacatgcaaatataatttgcttattaatttaatattatactttcagttttagtatttaatccacatcagataataatcttaaaatgaccaaggtcttaaaactatttatctttatcagatttatcttctaaatttttatttatatcaataacattgtttctttcttcttcatctttttctaattttatagttaattgttcttcaacttctttagaagaattttcctctgtaactgcattttcaatttcattcagaggtaactctttattaaatgcttttacaaattgttctgcatctaaagtttcatatataagtaaagcttgtgctacatactctaatctatccatattttcttgtaatatacttcttgtcttatcatatgcaccatcaactatacgctttgtttcttggtctatctcaaaagcaacttcttcagagtaatttctcttacttgaaaaactattacctaggaatacttcatcatcactgtcaaatgacattggaccaagtttagaactcattccatactttgttaccatacttcttgcagtagctgtaactctttctaagtcatttgaagcacctgtagatacatccttaagtactagctcttctgctactctaccaccaagtaaaactacaatattttctttcatttcattttttgtagcatagaacttatcttcaacaggaagttgcattgtaaaccctccagctcttcctcttggaactattgtaacttgatgaacaggacttacttcttcaagtacatgggcacaaactgcatgccctccttcatggtatgctgtaagtcttctttctttctcacttattactttcgattttttagccacacctgctataacctttgttatagcttcttctatagtttccatcttaattttcttttctctttttctagctgttaatattgcagcctcattcattaagttctctatatcagcaggagtaaatcctggtgttcttctagccaagacatccatttttacatcatcacttaatggtttatttcttgagtgaactttaaatatagcctctctaccttttacatctggtgtaccaacaacaacttgtctgtcaaatcttcctggtctaagtaaagctgggtcaagtatatctggtctatttgtagctgccatgattattataccttgatttaccccaaatccatccatttcaactagaagttgattaagagtttgctctctttcatcatgacctccaccaagacctgcacctctttttctaccaactgcatcaatttcatctatgaatatgatagctggagcacttttcttagcctgttcaaataaatctcttactcttgaagcaccaaccccaacaaacatctcaacgaaatcagaaccacttatactgaaaaagggaactcctgcttctcctgcaactgctcttgatagatatgttttaccagttccaggaggtcctaccataagcattccttttggtattcttgcacccaattcaatatatttcttaggattctttaagaaatctactacctcctgcaaatcttctttttcctcatctagtccagctacatctttaaatgtaactctagttttttcatcatctttatgaaccttagcttttgatttgccaaaactcataacctttccgcctccaccttgagactgattcataaacacgaaccaaataatcaccatgaagaatattaacagtaatgtaggcaacatttcgacaaaccaaggtgtagatggcttagcttcaccaccaaaagttagtttcccagccttagcttggtctaacacctcatctgcaagtttatttcccatcacttctgttggaacatatgacttaaactttgtatttgtatcttttatagtaccttctacagaagtttgatttacaaagtataatcttgatatattctcatctgttaattctctatatacttcagagaattttaaatcttttattttttctgtaggcttacctgagaattgaactatacctactataattataaaaacaagtagataaaaacctgccccttttagcaacttattcaatatagaagccctcctttcatacattgctttgccctataatttgttaaaattaatttttaatacttcttttgtgttttcatcaattttataattttcactgattttataatctccaacacatattattccttcactatctgtgattataggaattttacatctttcttctcttgggatttttaaatctatgaataaatctttcacttttttacttcccatagcaagctttatcttatcaccttgccttctgcttcttattactatacccccttttaccttattaaaatcaaaccctttagatgaattgtctaatttcatactcttatacctatctatgctcattacttgggtctcaataatttgttttaattcttttattttaataaacccattactaggtacattgtaataaaattcaatttcctcattaacaatttcctcattcgttaatattatactgtctttttttctataaacaaatatatttcttggaagagttaacattttatttacttttgaattatcttctaaagacattatatcttctatatgtctttggtcaacaaaattagtatctcctagtatatgttttatggaatttctaagaactctaactttgatagcatcatgtaagcaaacaaaatcgtctaaatttatctctacaaagcctttttcttttatatttgaaacttctctaaatttagcttctgcctctttctcaatataatcgttatcactttttaaactattgctcatcctcactatagattctattacatttgaattaaaattatccttcatatatggtaaaaggtctaaccttatcttatttctagtgtatatattttctaaatttgttttatctatcctcggatttaaattataagcttcacaatactcctctatctcatttctttccacgtctaatatgggtctaattatgcaattatctctaatataatcaattccctttaagccttttaagcctgttcctctcatgatacgcatcataacagtttcggcttggtcattgagattatgacctattgctattttattggctttaatcttatccttaatttcataaaacatttcatatcttagcttccttgctccttcttctaatgataatccctcattttcacaatattttggtacattaatagactttacaaagaatataattcccatatcctcacaaagtttagatacatataatgcatctttttgagcttctatccctcttatttgatggtttaaatgtgctgcatatatttctatattaaaatctttttttaatctatttagtacatgcaataaacaaactgaatcaggtcctccagaaagacctaaaactattttatcgcctttttgtattaaattatgtttatttatagtacttagtaccttatcaaatatcatatttatccctcttacacttagttttattcacttttaagtatactttctataaaaaaacgctaaacccttgtatcaattttaagaaattaaagtttaatataaatataataataccaaataaattaaataaaaggtagttttttcactacctttataaaatttctggaaaatagccatagttattatttagtacctatgtatatatctattttattcctacctaaaaataaatcttgtacctttatattatagtctattttcaattttatgtgttccccttcttgtatatttatatctaattctcttgtatcaatatcaattaataaagtaccttgtggggtcacatactttgtagtactactttctccacatttaaacagcattgttgagttaatagcaccaaactttttgatactaacttgatttttaagtatctttatagtattagttatttctatattttcttctttttccttgtaaataacatatattccatcatttttataaaaaattttaccaaaggcagtcatctctatggtgtccatatttcctttttcatcatattgtctagtatttatacttatttttacactcaacgatttttcctccatagattcttcatataaactagtatttttgtatttctactttttgaatcttatcaatttttttctttaagaactctcttgctatatctgaaaatttttcaggtatatctgatacataatattgataagtcccatgaatttctgtattgtttataatattttgcacctctaaaatcttttttaaatcctttgcagtctctttagctggattaacaagttttatatgctctccaacttcttcacctattgttctctttaaaataggataatgagtacatcctaacactaaagaatctatatttttttctttcaattcttgtaaatatatctttgctgtcaatttagccacttctgtatttgcccatccttcttcaacaataggtacaaataaaggacatgctttattaacaatttctatactctcatctattttagatatttccaagttgtatgcttttgaacttatagttccttcagttcctattattcctacaattttgttttttgtagaacttacagctgttctagctcctgcttctataactccaattatcggtatatcatatttttcttgagcttcttttaagcttcttgcagtagcagtgttacatgctataactatagcttttacaccttttgtttttaaaaagtttatagcttgaaaagtatatttaattatagtttctttggatcttgaaccatatggtattctggcagtatctccaaagtatattatatcctcatttggtaatatcttcattatctcttttagaactgttaatccacctaatcccgaatcaaaaactcctattggtttattgttcatctttatacaacacctactttacatttttgtgtttaacaacaacttatttatcgctaaaatttatatttatattcataattaatatattattacctaaatgattattatagtttattttacacaaaaaataaaggagctatcttaaattagaaaataatttctacaaaaagacaactcctttcactacttaaaaatttaaatttattttgcaaacacatgatttcctattctcatataaggattcaatctatttatccatttgcaagtggctatttctggattccaaaaatatactgctttattagttgggtcagttccataaagagcttcctgagctgctttacgtgctgagtctgttggtgccatctttattgaaccatcaagcacaactgagaaagcatttttttgatatatgacttcttctattgtgtctggaaatctagggtccaatactctatttattactacagctgctacagcaacctgtccctcatagctttctcctctagcttctcctgcaaccaacttagataataacatcaagtcattatcagataaatttattacttctttctttgctatatttttttcttgtttgtttactttcttaatattttctgttggttcatatgcaaatacctctttaataggcataaatataaaagtcaaagctaatagtgtagccatcagtttactccacctgtccatgattaaaaccactccttacattcttatttttaaaattttttctctaaatccttgactacttcaagtactttaaacttaatttttactctacttgttttttttggtgtatcttgttttattaacttatattctttatcagttaaaacttccttcaacttatcatctgtagatttatctatcactccattagattcatcaacaaaacatagtggagggaacataacacaccaccagttttttccttcacctttcccaatgataatctttaatgctttatattcaccagctggaagaactatattagaatattgtttagtagggaaattgctatattgtatacctacctttacactgtaattatatccatttttaagaataatatttttacttatttcttccagactactatattccttttttataatagcttcactttcttttatactttttgaattttgaagctttggctgtaaatattttattacttcatctctaacttttagtttaagttcttgatcttcatctgtattgctgtttgctataacatgaaatcttattaatttatctttataatcttttgatatattgtctactttttttacctcaccatttattactattgtcattattgatatgactgatataagacttaatattaatagtcccaatctaatcttaatttttctcattgaaaattccccctcaagataaatttatatcatcaattatgtccaattaaatttaatttattcataatattttttaatactaataaaaaaagctatcttaaaatgattacaatcattttaaaatagctttttaaaccttatattttataagtctttactaatcatagccttatctatcataaactgctctgctttttctatatgctctgtagcatacttcttggatagctcactatcacctttaattatagcatcaagtaagtatttatgctcttcaacaatattatgtgatgtatcataagcagacatataggtaactctaaatctatatacttgttcccataatgagtttattagttggattaattttttattattagttgctttaaatatacattcatgaaattctacatcaagttttaataacgcatctacatcggattccaaagtgctttttttaaattcttctgatatatctttaagctttttaatatcttcatcactaattctttcagcggcaagatatgctgctaagccttctaggcttgctcttacttctaatacatccataatatcctttaatgacatatttgccacatacgcaccttttctaggcaacataacgactaaaccttctaattcaagctttcttattgcctctctcactggagtcctacttactcctaattgttctgctagttgcacttccattagcctttgaccaggctttaattttccttctaagattgcttctcttaaattctcaaagactacatctcttaatggcttgtaattatccaagttcagtttagttaaattctccacaaatttcaacccctttttgactgctattaacaacatacacctgtttatatttttttaataattctttttttccaattagagcatcttctttatttttaaatagtccaaaaactgtaggaccacttccactcatcatagaacctaaagcattatttttcatcattacttgttttatatcacttatttctttgtgtttacctatagtaacattttcaagaatatttaccatgctttctgatacagcttttatatcttcagattttaaacactctatcaaatatttattatttggtctttttttaatattattcaaatctaatccttgataaacttctttagtagaaacgaataagtctggtttgcatatcaatatatttgtatcacatggtaaacctttgatgtttgttagcttttctccaataccttgagctaaggcaggtcttcctgatatacaaaaaggaacatctgcgcccaaattaagtcctatttcttttaattcatcttcagataatctaagttcccataggtgatttaaacctactaatactgcggctgcattagaacttcctccagccatccctgctgctacaggaatatttttttctatgaatatttctacacctttttttatataaaatttatttttaagtattttggcagctttataaacaatattatcttcatctaaaggaatatctaaactagtgctttttacctttatttcatcttcgtctaattcttttatctttactatatcgtataaatctatcgtttgcattatcatttcaacaaaatgataaccgtcttgcctttttcccaagacatcaatggataaatttatttttgctctactctttagtcttataaaatccattctatcctccttgtttaaagaataatgcatcactaacaataatattatactacaaaaaataaaataatagggtattataataccctattatacttaattactttaaattttttaatattaatctactaatacgacttttttttctaaaataagacacttaccaggcttaattggttcatcaagttttatatcattaagttctgcaatttcattttctgttgtattgtatttttttgctatattccagaaagtatctccttctttgcatatatatacgattatgctaggagctttagataaatcatatacaccttggtcttctcctttgataataaaattttctgctttcttatctaatgcttcagtaaatctcttaattttgataatcaagtctatctggtccctattcaaatcaacttcgactttatcaatacatgctgtattaaacacagatgctgtatcagttagattatccatttctatatcatgttcaaatggaatttcctcactaattttataaaccaattttaaaccttcaactgggacaaataaaatttcaacttttatgattccttgtataatgcttttatttccttcaatataactattttctatagacatggttggacaaacgcttacaatatcttttatttgtatatcatcattatcatttcttatgccttctctaaccataaatgtttcttcactacgtcttaaagtcttatttaattgaataggtttgtggtcaaattttattatcttttgaggcgaatatgcatcttgtaatacttctcttgtaacttcatctgtaacttttaccttacaacaagccatacaatctatttctaaaagacctgtgttgctttcactattttgcttgaaaatatgattaaaatctgacatagacaacaatacttcttcagtcataccatcactaactccagggacttctacaaattgagtaaactcaatacctactctatccaactctacaagttcaccctcatatgtacaagctaacggatttatttctaatactccaccaataataactttattgtcagtcactctactttcttttactttaacacatggatttaaacttattatagattgaatttcctctgtgtttattgttatagtatctcttatagaactttctgctttttctattccaactatatcttgaaaacaaatttcctttctgtgcttttgtatgccttccacttgcgccacatcttttacaatgtctaacctttgcttttcaaacaaacttccccttatattcataagagctcctactttaatctttctctcattcattatagtacaatccatatgctctacttctgaaaataacatgtattccatatcttgaacaacattgtctttttctattacttcgtttatatctacttttccgtctacattagaaatagtatttttatcatctgcaatatagattacattataattaaaactacctctgcaaagtatcttcccatctgccatttcaatttttttaagtgatatgtatccttctgtttttacaatttcatatacatctaattttttgtctggtacaactgcctccgcttcaatgaatgtttgaaattttccaaagtctattctattgtcaactttaattacatctttaattaattccatagtctacctccttaagtattataaaaatatcacactatatttatatttaaggagcaaaaaaaaaattacacctatttttaaataggtataattttaacttatttgtaatttatcttgatctctaaaaacttgcaactttacattagatgttaataaatctgagtaactataagatactctaggatatccattactttcatcatctaactttataacaaacacgcttggataaactttttctagtataccctcttttgtaataatctgctttcttcctttattagctttcaacaatattttctttcctatatgtctctctaagcttactcttatcttatctagagtttgaacagtagccacaatatcaccttctttaacgtttatatgtttacataatatcacatataaacatttttgtcaaatgtttaaactaattattttatatattttttgcaaaaatgtcaatactatttttgaagatatacagtataattatgttaatttttgctaatgtaatattgtttttggcattgcccatctaaattttcctcttgtttcagaaccaccaattcccttaacacctgtaatagtctgctctataacctcatcaataggaactactacatcaattcttgaacaagcaattttctccactataaaaacagggtctaatgcatgtatcattattcttccaggcgaacttgcataatttgctcctgcacttattattttttcataatttgattggcatgctcctgcgaatatgacaagattatccaaatttggttgccatttacgtgcttcttttactgttttaacaaaatttgaagagtttctatagttactcatatcttctatatctcctctttttattgtcattgcatcatgacctgttattactagtatatccggattatatttttctagtagtgctcttacttctttatactgattttgctctgaaacagctacacctactgcaggtattccaagttgagcatatacatccaagcaaatttttaaatattctttatctccatctatctgtagtacttttccaggcattccatatgtgttaggatttaattgaagttttggaactgctctagtcattcttttttgtctttctttagcttttcttactgacttatataataaattttctacatttttatctattaatatatcttttatatcaggtgcttttactaattctaggtcatcaatataagcatctgctattactctaaatgcaattccctttagtatagctattttctcattattttcatctacaccaaaagagactattttaaatactatatctttgttatgtgactttctagctacaatgtctcctaccttcatagttaaacctccaataaatttttatcttagtttatactatgttcgatataaaactttgtttcctaatgtcaaaaaaacatttcttataatacttcttttatcactcttaaagcatttttatagtatatcttttctatatcatcttcactaaacccttctttttttagaggttcatacagtttacccatctgagatatatcttcaatctcaacttttgaatctattccatcaaaatctgaccctagggatacaacatctattcctccaacatttacaatatgttttatgtgtctaaccatatcttcaagtttactttcacttttatcacttaaaaataagtggaagaagtttatacctgtaactccacctttatttgctaatactttaatcatatcatcagttaaatttctagaatgattcatcattgctcttgaattagaatgtgtagcaattattggtttagaagaaatctttgcaatttcataaaatccaccatctgaaatatgagaaacatcaaccaacattcccaattcattcatcttatgtaccacttctcttccaaaatcagtaagccctttttctctatattctactttattatgaggaaagctcaattcattcacatgattccaacttattgtcatcattctaacccctaagtcgtaaaatttctttaaattttctaatttaccttcaagtactgcaccttcttcaatagataaaagagctgtaagtttaccttctgattggtttttcataatttcttcatagttagtagctaaagctatttcatcactattttttttcatttcctcatgaaatttatttgccatactcatgcaataatcaaaaggatgttttacttcttcagtatcaacaaaaagagcaaatgtttgagctaatgaatccccctttttcaatctgtctatatcaacagaatatttattagacttaagttcacttgtttctacattttccattaattttgctatagtatcacaatgtaaatcaataaatttcatatttataccccctgtatattttatatttatatctaaaaatagaaatagttgtccttatagacaactattgacaactattttttaatattctttttaatattacttaatcttattcttcttttaagttaggtattacttttttaacttcttcaatttgatgccatgttttatctatattattttcactaatatatttttttaaatcagttaaagatgtaaaatctttaactgataaattgtcatcatcatctgcaaatcttaaaataaacatgagactcccttactttccacaacatttcttatatttttttccgcttccacatgggcatgaatcatttcttcctatttttgcttctttaactattgttttagacttcttataagcctttattatttcttttctttggtctgctggtagtatatcttcccaaccttgtaaattatatagccaatgagcctcaacagttaccatattgttatataatttttcccaatctatttttatagaaacttctttatcagcttctacttcttctaaaactatatcttcttttaagctttcacttattccatctatgaatcccatgaaaaattcattagtagttccaaatttttcagccaattcacttactttaccttcaacaacatccattttattatttaatatttcattgtatattccagcttcaactttcaaatattcttcccagaattttacttctgcttcttgactttcatgattatcacttaaatttctccattcagtatataaactcatactttttcctcctaagtatacctatatttttatagtttttatagtataaaatcttttagttagattggaagtttcttctttttgattataccatattctatttaaagttaactcttatattatatcataattaaacaattcttttaatacttttatagcatactcttggtttataaaataagggcttgtcgcaattgttattactttggcttttttaattaagttttttatcttgtaaaatttgagttcaaatggtatatagtccatatcacttgaaaatatatccaaatctatatcaagaacaaactctgattctacttctaaatcaaatccatacagactatctattattattaattctgaaaatatgttatattttaaagcaggttttataaaacttcccacatttaaaacttcatttgtatacctaaatacatcttttagattatttacatctacatcatagttctcaggctctctagtatccttatgttggtctacatgcactaacttgcatccttttgtaaattcaccctttaacaaagattttgcccaaaaataaaatgcatggttatgattgtcaaacacatatatctttttatttcccaggacatattcgaccatattctccaatccttttgcttttatttccttattttcatctacttcattaaataccacctcattgcctaaccttacatcatttaatgtaccatttataagttttggaacgtatatgctcttattttctcttttatcatatgaaaatacattatttcctactggtttttctatataaaatccactatattcataattttccataaaactttatttcctccattgttatataaatatataagttataattttaaaaattaaaatgcacttattgtaaatcatattatctattatagaaaacatcttatataactaaatataatatcttctctcaatatgtattatacaataagtgcaaaatatatttatataaaatatactacattcctataacaaaaccatcagcttcaattggaaggtaactaactcttctattcaactccacctttccaaaaaatactacccaatatggtctaaaaatactttcaattttaactatttcaatctctgggattcctcccataaacctatgaattaatctcatagccattttatttgcctttgcttttactcttcgttcgtccttattactatactgcacaatattacaatccacattttttacaatttcatatgtaggaaaatcttgtactatactaccagaacctgtagaaccattcactaaaatttttaattcatttatatcattagaatatctcctattcttgaaaatggatttcgttttgtgaattttaagtgtgataattttaaactctatataatgaagtctaacttcatgagcatatttgttctttaatattagcttactaaataaagaatttttcccacttttagctatctctatagcttcttcttttgtaattcttataggtaacgctcttatatccataaaatcattctctttcttatttttttcttgtcatttttaaaactctatatatataatcaaaaaatattacaattacaactgccataactccatatggaattatttttccaactataatatcatttctagtcaatataccataaaatataaatcctgttattaaaaagtacaataatactagaaaaccgtctactccaagccattttatttctaaatctttttttaccttagacactaatttagacatagcagtttctccttttatagattattttgtgtatttaaattttcacctattctattaccaatcatccatgcaataaatgaaaaaggtatagctatcacaagaggctctaactcaaagctctgaactggaaatattttaaaataaccaaaagtcactccacctacaatcattcctaaaataccacccatagatgttcttcttccatttccaagaagcccacctactataggtacaaatgccgaacccatccaaatacttcctacaaatatacatgcatcatatacattttcaaatctaaatgctacgctaagccccataactgctgctaaacatacacctattctagtaaactttactaattgtttctgagataactctttttttgtaattcttccatatatatcatttgctaatgtagctccagctgctagataatagctatccaatgttgatattatagaacctaaaattcctattataaatattactcttattccttgtggtaatgtatctaaaactaaagttatatatccagcggctggagccatctctggataagtagctcttactataagtcctgttatagttaacaccatgtcaaaacatatccatagtgaaaaacaagttaataaggctcttcttccaaccttaggagaatctgctgctgaaaatctttgataaaaagttgggtctgaataagctccaaaagaatatacaattaacatcaatgctttcatagctgacataccttttgtagggtgcataagctgtggtgcatctttgagtgcttctgtgagaccttgaaatcctcctatttgttcaaattgacctggcataaccatagttaaaccaaataccatacaaaaaaacaataccatatctgtaatggcaactcccataagcccaccaagtactgtaagtacaacgactactcctaccattattaatcctattaattctttatctattttccatgctacgttacctatagttcccatagcagttatttctccaagttgtgcacaatatataaacatcaaaattgccccaattatagcaacatgcttaccataaaaactttccagtaaatcaggaactgttatattggttcttatatgaatccttggaccaacccacaatgctaaaggcattctcccaatatgtgcagctattgaccaaactgcccatgcagatattccatatatagccgcatactctacactacctactgtaccaactcctccataccatgatgcaaccaaagttcctactattaaggaccatggtaaacttcgatttcctaggtaataactttccatatcttttacatttctagaaaaataataacctattcctaataatataaatgcaaatataactataatcccattttcccaaaatgttaacatatctaatctccacattcttatattttaatttttaactttaatatctaaatatgaacaactctacccatttccataaaaataggtagagttatataataattataagtatttaagtaatcttgttattaagcaattttattgtttaaacctttattttctcttttatttattttatttaaagcataagtagcaaatatccctataactgcacatactacagataaaataaatatatatgtatatcctgtttgtccatatttatctaaccaattacctgcaatagtgtaataaaacgcatctggagaaaatcctataaatgaagcaaatccaactactgctcctgtagtttctaaagatatattagactctgaaacagatgcaaagtatatacctctaaatccaaataaaattacacttagtattatcatgtttattacagctatccatataaatcctgtactcttaggaataaccaagtaagcagctgtacttactgtcattaatataaatcctacaaacattactcttatagatgaaccaactttatctgttataacaccagcaactggagatgctcccatttttataacataagttcttattattgataaagcagaaactagagtcattggcattacataaacttctgataagtatggacttaaataagttaaacttgagaatactaaataagttgaaaatattataagaccaattaaccaagcctttggcattgtaactacttttaacaatgacttaatacttaatccttcatctgatgctccactatcttttttctcttccactaagaaaaatagaagtataccacatattatagatgctgcagaatataaccatactacatatttgaatcctactgttatttcagcaaatttaccaaagaagtaaagacctataaaagaaattaacgtacctgatacacctgataacccttcataaaaaccaaatattcttccttgttctgactcacttccttgcattctaacaaccttaacagatgctgagaagaaagttaatattgttgtaaatccccataatacaaatattaagagtatcatactatatgatgggaatgtagagaaataaaaaccaagtactcctgaagcaattaaagaaaaagttatcagctttctaaccgagaatctatctgcaaaccatcctcctataaaataagataccattcctactaatccatataaactcaataagttccctatttgtgtatggctcaatgataaagcttgttgcattgggtcataaaatgatgatttcatatatggtaaactatacatagccgttgttccaaatgccaatatgaatattatcaagaatcttttaaaattacttttgttctccattaattttctctccttaaaattttattgtttataatctcattcatgtaattttattttaatttttttattgcttgtttaaagtcatttattatatcatttgaagattctaatcctacagctattcttattagattttctccattcatttgaactaatgtatgctcttcccctaagcttgttgctattgttgcaagctctaaagagttcattaattttctactagcttggtctcttgtcaatccattgataccatccttaagtttaaatgaaactacacctccacctaaaccattcatttgagttttacaaagctcatattgaggatgagattttaatgctggatactttaccaattccacattctcttcttcctctaaaaactctgctactgctaatccattttcacaatgctttttcatcctcatatctaacgttttcatacctcttaaaatcatccatgcactcattggtggtaaagatgctcctgtaaaacaacataaacttggccatctaactaaatctattaattcttttgaacctgctactgctccccctaaagtatccccatgtccatttataaacttagtaagactatgtattactaaatctgcacctaaatctattggtctttgtacaattggtgtcccaaaagtactatcaactatagctaagcttttattttcatgagcaatttctgctattgtttttatatctactaagtctaatgatggatttaaaggactttctatataaactattttagtatttggtctcattgcttcttttacattttgtggatttactgcatctacaaatgtaacttcaactccaaatttagataacaactcagacatgaataatttagtgtgtgaaaatattccatctgaactaactatatggtcaccactttttaccaatgctaatatagtagatgttattgcccccatccctgatgtactagatatggcactttctgcattttcaagcatagccaacttagcttctaactctgtaagagtaggattacactctcttgtatacacatatccccatgtcatacacaactcttcaaaatgctctactgtctttgcagcaaatgttgctgtttgacatattggtgtagccaatgcacctgttgttgggtctgcactatgtccccaatgtattatttttgtctctaaatcttgattaatattgttactcattttgatttcctcccattttgacttatttatacaacgttttccctgccaaatttaatcaatttagcttagtcttaatacattttttcaagtatacttttttatttgttataatttctaaaaatatgacacttattttgtttttttacagttctaattataaactctatagtaactatagagtcaatatgtttttgatattttttttacaatgtttaaaatagtcagtacaaaaataggtatatcttagaataactaaagtcatcctaagatatacctatttttatatcacaatataaataattacatataagcattagtttttttatcataaatagatttttcaagatttatcatcttttcataaatatattatagttaaatattttaatattacctaacatctacaataaaatatactcttaaaataaaattatataattaaaaatactctataaaagctaaaaagttttctattcgctacatctaaaaataattagatagaggtataaatgtatttagtttatttatacctctagtcttttataaattatatctctactaaattgattttttagcacgaataagtgtgctcttggagataccagtcatcttcacaacctctctatatggcttagaatttaataaccccaatgcatattgtatctgttgattgctgtatttctttggcctaccatctttaaagtcctttttctttttagcaaattcttttcctaattgagtacgttctattatcatatttctctcaagctctgcaactgcaagtaatgtagtcaaaaagaatttacccattgaagtattttctaaaagacctatatttaaaatatgaacacttacttctttagcaaataaaccttctattagttgtatcccttctgatgtacttctagctagtctatccagcttagttgcaacaagtaagtctcccttttttagagatgatataattttttcaaatttaggcctgtttgtagtagtgcctgtataagtttcctttattattttagcatcattatatttattcaaaatttcttgctgttgctgatacaaactgttgttgtctgtttgattttttgtacttacacggcaatatccatatataataatcatcacttcctaacataaagattttgtacagaagttacccagaagcttgtttttacttatctttatccattttactaaaacgatttttgggtgtcaatactgttaacttttgacaccataataattcctttataatttgtttgactatgtcaaaaattaccaatataatgaaattaatgagtttatacaaattggaggaaataatatgaatagtctgttaaaagaagcaatagatgaattaaaaaacatccattgcggggaagtttttttattaaaagaattgttcaaaggctatgaatggaacaggttggagatgaatattagattgaaattaggaaaactttttttgtatgaagtggtaactaatcccaatttaaatgtagaggtcatcaataaaaattctgcttatcagcaaatgtataaaaaaaaatagtgacttaaatgtatataatagtataatcttcttattgattcaaaagttaaaacttttaatacaaaacaatcattctattttaacatttatcaatatgtctaaatttatataattaacacatacgaatagtattgtttaaatcacattatttaagatagataaatcttaaccctactccagcataaatactaaaatagggcttagaattatctatatttttatcccataaaatgcttagctcttcctcttgattgaacatatatatctggggaaatacaatagaagcgtaaatttataaaatttccaaagtcagaaaacttcagttcaaacttaggtataccaaaactttcaggtgctatttcatcaacgccaaaatagatgataattccattatctgtaatataaaatgcttggtcttcaggtataactaactcaacattagaataatacatttctctattttcatttatttgagatttaatgtaatcagtaattatattaatataatcaactccatctctaaaaatgtcattaagtaaaagttcttttccagttgtcaaatctatattgtaattattcaatgtattgtatttaggcccatagttattagcaaaccccataaggtttaatatcatactcagtacataatttttattaaaagtaactgcgtaactggtagatacccaatagctttgttttggaagtgaattttgagaagctgcgttattatattctcgttcttcttcctgtaagccatttttaaaattatttacagtcattcttacagcattgtttatgttatttaaaataactgggtttacatacgtggattgatttctaatattgtatataacaggatactttacatcatatgaaaaatacttacttctttcaaaatcttcattaaattgtacatataatatattatatgtacaggtatttgtagattgataattttccattaaaatcctcccccttttataaaaaaatcagatacaatataatatgcttaaaacagtaataatgttaatagtaaatgtaaagaatagaaagtatctaaaacagcaaaaaatgactaattttgtggtataatacataggattgagagttattttataggaggaaaaatatgttattattagcagataaatggaaagattatgaacttatagatatgggaaatggagaaaaattagaacgttggggaagttatgtacttagaagaccagacccacaggttgtatggccaatggaatctgaatgggctttatggaaaaaccctcatggacattatcacagaagcaataaaggtggaggtcaatgggaacacaaaaaaagatatccagaacaatggactataaattataaaaacttaaagtttcacattaaaccaactggctttaaacatactggattattcccagagcaagcagctaactgggattggatgatagagaaaataaagaaagctaacagacctataaaagtgttgaatctttttgcatatacaggtggagctactgtagcatgtgcatctgctggtgcagaagtatgtcatgttgatgctgcaaaaggtatggttaattgggcaaaagaaaatatagaattatcaggtcttaaaaatcaaacagtaagatttatagtggatgatgttgtaaagtttgttgaaagagaaataagaagaggtaaaaaatatgatgcaataataatggaccctccttcttatggaagaggtcctaaaggagaagtatggcaaatagaagaaaagttatacagttttgtagatttatgtatgggagttttatcagataaccctttatttttcttaattaattcttatacaacaggattttctccaatagttcttgaaaatgtattgtctacaacaataggtaaaaagacaaatacaggagatatatacggtggggaattaggaataccagcttccagagatggtaagatacttccttgtggtatatttggaagatgggagaaaaaataatgataaaagtcatatatgaagataaccatttattagttgtagaaaaaccagttaacatattgtctcaaggagataatactaatgataaagatatggtaaatcttttaaaagactatattaaaaaaaagtataacaaacctggaaatgtatatattggtttaatacatagattggatagaccagtaggtggagttatggtgtttgcaaaaacatcaaaagcagcatctagattgtctgagcaggtaagaagtaagactttcaaaaaaacttatctagctgttgttcatggcaagataaaatctaactcagatatactaaaagattttttatataaaaataaaaaaactaatatggtaactgtagtgaaaaaaagccataaagatgccaaagaagctgaacttaactataatgtattagattttaaagaaaatctaagtttagttcaagttaatttaaagactggtcgttctcatcaaataagagttcaatttgcaagcagaaaacatccattatacggagaccaaagatatggcaaagaaataaataagattggacaacaaatatctctttggtccaataagatagaaatttgccatcctactacaaaagaaaaaatggaatttacatgtcatccacctgacaaatatccatggaatatattttaaatctcaaatgaggtgattatatgagtaaaaaattttcaataggagaaatgtctaaacttcataaaataagcatacagacactaaggtactatgaccaaatagatttatttaaacctgttcatgttgaccaagaaagcaattacagatattactcaattgaccaattttcacaattagatattataaaatatttaaaatatttaggtatgcctttaaaagaaattaagtcaaagcttgatgaaaataatgaagaaattctaaaattactaacaaataaaattaatatagtggatgaaaaaattaaagaattagagcttataaagaaggtactaagcacaaagaaagaaactatggaaaaaggtatgaaagtagatgaagttggtaaaatagtgagaaaacatattccacgaagaagtatcttatctatagagtatgaagaaggattaagtagtgaagaaactatggaactttccagaagacaaatagcaaatatattagaagataatatatctgtgttctatggtggagtaagtggacttgtatctatagataaatttttaaaagaagataaagttatttatgacaatagttttgttactgttgaaagagacttatttgatataaaatcacaaaaacatataacagaaatttcatctggtgattttatttgtatgacatataaagggtcttacaaagaaaattataccgcttttaagaaactggttgattatgttgaatataaaagaatacctattgaaaattatatatatgaaatacctataatagaccctctgtctacaaacaacgaagaggaacttctaacagaaattcaaatacaagttaaaaagagagaaattgacttaagatgtctagtgtagtaatctagtttacttacacatcttaatatagttgtctattatcaacatatgatttttctagatagtgattcctaacagtgagattttcaaaaaataggaggaaatatggctaatgctaattccctcctatttttaattaatccatatcattttaattaagccatgtcatcacgaagtgcatcaataatattttctttttttatcttattaatagtatacaacattgtaataaatactataaataaaacactaaatatactaattccaatactaaaccatggaatcacaaaatcaatatcatctgtaaccattactttatgaattagccatgaagaaattactgctataggaagtccaaagaacaatgctctcatgccataaaaagcacactcaaaattcatcatcttttggaaatcatgctcagacattcctacagagcgaagcatggcaagttctctacgacgtaacttaatattagttgaaattgtattaaacacattggcaatcgaaatcagagaaatcataattatgaaagtataggcaaaaacattggcaataaaaatgtaattacggttctcatccatcattccatacatattgtacagattgtactcattagtaactccctcactctcaataatttgctccatttctgcaactgactgagtaggatttttcgattgaaagcttaaactttcaattcctgtagaaacaccaggaatctcaaacttatctttggctgaataaggagccaatactctgaagcttgctttcttcacatctgaacttctgattcctggaggagaatcaggtggcactactttgacaaatgaaatattcacattttgtctctcaggtatctccaacttgccattagtttcaggagtgagactaacattcatagaagaactgttgaaaatatcaataatattattatcctttgttaccatagaaacagcaatcagttttgcattttgtccagtatattcttctgctggtaatccaagacttttaataatattcagataagttctatcatcaagaaattgcatatctactggtaattcaagcatttcactcatagaatgtgaaccctcatagttcaaataatcgtctgtaagctcacttactttggcaacacatgaataggtcataagtttctgatacaaaccttcgtaaacaccatttgcagtttttagcttatcgtaaagcttcaacatttcgttgtctttcataccttgtgtagaaaaaataatatcctgatcagtaacctctgacctctgatttgacatctgttttaggtctgctactaaagcacttgtagatataaataaaactatgcttaaaacaagcgacaatacaatacttcgataacgtttcttgtttcttttaaagtttttcatagcaagaactccctcaagaccataaactcgctgtgttagttttgatgtcttcacagatttagattcaatttttacctcatttgtctgacgaatacactccatcactggtgtgttggcagcctttcttgctggtatgtaagcagaaattaagattgtaaccatacttaccactgctgcaacgatgattgcagggatagacaatgttaatgtcaacggaacgtttacatagagaatatttgcaaagtttttagctatgacagaaatcacaagtccaatactgactataccgattgcaacaccaattggtataccaatcgcaccaatgcaaattccttcaaatagcaccgaatttcgtaactgttttgctgtagctccaacagatgaaagtattccaaattgatgtgttcgctcgttcaatgacatgttaaatgaattatatattagaaaaattgagcctagcatgattatggcaagcacaatgccaccaaccgagtacaaaaacatattgaacaaattgttatcagaaacacctatgaagcgcaacacattgtcattgaaaatggaagcatggtctttagtgctacttgtgtaagagcgaatctgatgtggatttttcaatgtgacaaaaaggctaagactgtcagtcttgacttgtttatcttctttggttatcaaggtatatcctggtgcagaagattcttcaaatacgggctttctacagatacccacaactgtataagttttcttatcctgtggcacaaaaacttcactcccagcagtgtaggggtcactctgaccaagcttttcattttcactcattcgtttccctacatccaaagaaatagtatcacctactgcaaatttgacaccaccatctgtcgcaactttacttgaaacaagaatctctctactattttcaggtaatcttccagaaattaaagttataggcaaagtatcaaaagcttctttgctaaatccagcaataaaaagatatggtttatctggatttctgttaccttcaagtgttgcatagccaatattttcaaatgttgcagtatttgcaacttcatcattgactctttgttcctgtacaaaagaagaatccacatccaaaaactggacatgccaatcaccatattttataatagctccatttgtcatatagttcatcaaagaaactccaaaggtagtaactgctgtaatcatagcagctgacagaacaactcctataattgttacaagagttcgagtgcgattctttttcaatccttgcagagcaactttgttaaaaatgttcattaacgattcaccttcctctcatcacgcaccacttttccatctgaaatacagataattctatctgcctgtaaagcaatgttttcatcatgtgtgacaataatgagagtttggtgatatttactatggctctctttcagtaactggataatctcttgtccatttttactgtctaagctacctgtaggctcatcagcaagcataactgctggtgcattcatcaatgcacgaccaatggcaacacgttgctgttggcccccagaaagttgatttggtaaatgtgtttttcgttcttttaaaccaagtaattctaacaagtcatttaaccgttcttgattgaccttacgcttatccataagtataggcaatgtgatattttccactacatttaatgtgggtatcagattgtgaaactgataaatcaatccaacttgtcgcctacgaaaaatagcaagtttttcattgctttggccatatacatcttgcccctccagatatatctttccacttgttggtacgtctactcctgcaatggaatgtagtagtgtagatttaccagaaccagaagaaccaatgattgcagtaaactcccctttttcaatagtaagtgagacatggtcaagtgcagtaaccttattttcattcttaccataaaccttacataaatcttcaatctttaaaaacgccattatataagtctcctttcatattttataaatatatcatagaactttcaacttacatttaagtgacatttaaatgagagattcgtcactttggaaaacgaataacaaatattgcaccaccttgtgggtgattttgtgcagtaattgttcctccttgtctcataataatcgtcttacaaagtgccaatcctattccataaccagctgtgcttgaatttttcccacgataaaatctgttaaatagacatggtaagtcttcttttttaaagcctgctccgttgtcatgaatagtaagttgagtaaacaaaaagttgtcctcacaaacgatatcaatttttccattatcacccacactctccatgcagtttttaaatatattttgaattgcttctgaaagccaatttaaatcacccaaaatccttactccttttggtatatcaatatgtaaagtgatattgtgcagttccatgggaatcaaaagttgatgaagtgcagaactaatcaaattattcacatcaatttgttctttttgaaagactacaatacctgcatctaaacgtgataattttaaaagggaagtaatcagccagtccattcgtataagtaattcctctgtttctcgtatcaactcttttctctcatcttcatcagaagtattctctaacagtgacaaaataagagttactgatgtaagaggagtgcgaagctggtgggctatgtcagctagtgagtcagcaaggtgttctttttcttttttcagtgcgtaattttgctctctaatacgtaacgtcattttagttatttcactttgtagaatagaaagctcaccctcatctgattcagcaatatacagatggttagcattatgaagcacaagattaatttgttctgaaatctgtgcaatacttttgtatcgatttttagtaaacacaaaaaatgctattccaaaggtagtggcagaaacaatagaaagtattccagtcataatactgattgcaaatcccagggctacagtgagaatagtaattaataagaataaaatagcaaattttcgaaactctctatttcgaaacataacttccccccaatctataccctgtcccacgaacagtcaaaattatttgtggacttgaagggtcatcttctatcttctctcgcaagcgtttgatgtacacagtcaatgtgttgtcattaacaaactcacctgccgcatcccacaattcatcaagtaatcttaccctcgtaataatacttttaggattgctaataaacaccaataacaaacggtattctaaagctgaaagaaaaacctcattgccattctttttcacaacaccggttgccgtatctacataaagcccacaaatttcaaaagttgacccaaaacgcccactttttcgtagtgctgttctaattcgcgcaatcagttcacgtggacgaaaaggtttagtaatatagtcatctgcacccatattcagtccagtaacaacacttgattcatcaccagaagccgtcaaaaagataacaggaatgtcttgcttttctttgatttctgtgcaaatcgtaaacccatttccatcaggtaaagaaatatcaataagtgccaaatcaaatttattcttagcaatctctacaagtgcttcacttcttgtggatacatgggttactataaatccttctgaattaagcaaaagaataagatttttggcaattgctttatcatcctcaactaaaaatatccgtttcatttactttcatcctcctttattttattagttttatatattccagcagagcaatagtacactactattttacttatcattacacaattttcagtagtttcttttgttcttatataatccatgcataatacctccattgatttattatatttcttataacataaatacacaagataagacaaaaaacataatgtaagtgcaagttttttaactcactaacttataaacatacactcctactaacactactttcttgatgacacatcttacaagcttatattcatacatcaatgaaaaattaaatttatccatttattaaaataaaaggcaatagcttctatagctaatgccctttatcttaaaatgatttaaatactatacaatttttataaatggctataaataaactcgtatagaatataaaatttatctacagtcttttgttatacaaaatttataacctcttatagaacaaatttaccactttgtaaacttatcacttttactcagctatattataaacttttaatttatctttgtttaaatgtttcttcttaacttctactaaagcttttagcgtatccaaagatgtcattatttcagtagaaaattcaatggctgttcttctcatcttaaatccatctcttgtagagtcatttcctttagttggtgtatttattactatatcaacttgtttatttcttatagcatctaatatgtttggtctaggctcttcaattcgatttactatatcagcctctattccattttctcttaaactcttcgctgttccttctgtagcaacaaaagtatatcctaattctttcatatcttttgctatctctataaactcatctttatcatgattatttacagtagcaagtactactcctctttcatcagacatatgtctacctgctgccaagaaccctttatataaggcttcttctaaattttctcctacacctaggacttctcctgtagacttcatttcaggtcctagacttacttcaactttagataatttagacattgagaatactggtacttttactgatactaattttggctctttgtaaactcctgtaccatatcctaaatcctttaatttagctcctaacatacacttagtagccaagtcaactattggtactccacttactttacttatatatggaactgttctactagctctagggttaacctcaattatatataattcattttgaaattctataaattgtatattaaccataccaagcacattaaggtctaaagctatttttttagtgtattctactatcttttcttttatttcatcagatatattttgacttggatacattgttgtactatctccagagtgaactccagctctttctaaatgttccattataccaggtatcaatatatcttccttatcacatatagcatctacttctatttctctaccagttagatatttatctataagtactggatttttatggtctctatcaaatgcatcatccaaatactgaattagtttttcttcgttataagttatttccataccttgaccaccaagtacataagatggtctaactaatactggataacctaactccttagcaatttcaacaccttcattagttgtccatacaccttttccttttggtctatttatatctagtctctctagtaaatcatcaaatttttctctatcttctgctgcatctatatctctaaagtctgttcccagtataggtatatttttttcatgtaaaaacttagccaattttatagctgtttgtccaccaaactgtagtattacaccttctggtttttctttttctattatatttaaaacttcttcttctgttaatggttcaaaatacaacttatcagatgtatcaaaatccgtacttacagtttcagggttattgtttacaattatagtttctattcccatttttcttaaagattttacacagtgaactgaacaatagtcaaattctataccttgacctattcttattggaccagaacccaatactacaacttttctcttatcactaactactacctcatcatattgttcataagttgaatagtaataaggtgatagagcttcaaattctcctccacatgtatcaaccattttataaactggttgtatattatataaacttctcaattcatataatttttctgggcttatcttcattaagtcagatatacctttatcagaaaatccctttttctttaattcatgtaaatattctttatctaagtcttctatttttagaacttttaacttttcttcttgttctactatccatttaaatttatttataaaccacttatcaacaccagttatttctgatatcatttctactttatagcctcttcttatcatttcagctaagtcaaatagtctctcatcatcaggtactactactctagcctttaattcttctaatgttctaccttctgatggagcatgaaccaatgaatattttcctgtttcaagtgatcttatccctttaagaatagcagcctcaaagttacttcctatactcatgatttcaccagttgccatcatcttagttcctaattttctatttgcatgtctaaatttatcaaatggccactttggtatttttactaccacataatctaatgttggctcaaaacaagcataagtttttttagttactgcattttctatctcatccaaagtataacctaaagctatcttagctgctacttttgctattgggtatcctgtagcttttgatgctagggctgatgacctactaactcttgggtttatttctattatcgcatattctaaactatgtgggtttaaagctatttgaacgttacatccaccttgaacctctattgcatttattatgtctattgatgcctttctaagtagttgatactcttcatcacttagagtttgacttggagcaacaactatactgtctcctgtatgaactccaactgggtctacattttccatattacatacagttatacagtttccatttccatctctcattacttcatattctatttctttccaaccttttatactcttttcaagaagaacttgtccaacaggacttagctgtagtccatgtgaaagtatttctcttaattcttcctcagtatcagctatacctccaccagttccacctagcgtatatgctggtcttacaactactggatatcctatcttattggcaaactcaagacctgcttctaaatttgtaactatatcactaactattactggttgatttatttctttcattacttctctaaataaatctctatcttcgcccttttttatagattctatagatgttcctataacttttacattatatttatctaatataccagcatcatgtaattctacagctaagtttaatcctgtctgaccacccatacctgcaagtaaactgtctggtctttctttttctattattttttctataaattctattgttaatggttctatatatattttatctgcaatttctttatcagtcattatagtagctgggttactatttactaatacaacttcaattccctcttcttttaatgcttggcaggcctgtgttcctgaatagtcaaactctgcagcttgacctattattattggccctgaccctaatactaaagttttctttatactatctaatttaggcataactctttctccttatctaaacaattttcacagttcttatcttcatcatctatacaatcaactttaattactttattttatcttaagttcaaatttactcatcaatacatctatttaatacatctatgttaattaaaccaaactttttgatttaagttattcttgttttttagttagctattctaatgttatttattttactaattctaaaaatttatcaaaaatatagtcattatcttttggtcctgggcaagcttcaggatggtattgaacactgtatacatctagcttctcatgtctcattccttcaacagtattatcatttaaatttatatgtgtcactttcatttgttcaggaacttctgaaacataataaccatgattttgagaagttataaatacttttccttcttctaaatctttaactggatgatttccacctctatgcccaaatttaagtttagcagtttttcctccaagagctaaagctaaaagttgatgtcctaagcatattccaactataggttttttaccaataagagcttttatattttctataacatcttctaggtcttctgggtctccaggtccatttgacaagaatattaagtcagggtttatactcaatacatcttctggagatgttgtagctggaaatattgttatatcacatccacgagctataaatgatcttaatatatttctttttactccaaaatccataacagccacttttggaccatttccttttatatgctctacttcttttcttgtaacagttctaactgcttctgtatttgaaaacttatccaatttatgtttaacatcttctaatttactgtcttctaatgtaattatacctttcattgttccattatttctaagtatcttagtcaaagctcttgtatctattccttcaagtccgataactttattttgctttaaatattggtctatatcaatttcacatctaaaattacttggagaatcacttttctcccttactatgaatccctttacttgaactttttcagactctgctgatgataaatttataccataatttcctacaagaggataagtcatagtaactatttgaccatagtaagaagggtctgttaaaacttcaccatatcctatcatcgaagtattaaatactacttctcctacactttcttctaaatatccaaatgcctttcctataaaaactgttccatcttctaatattaaccttgctttcatactacagtacctcctataattctctttagacaaactaaagaacattaactaaatataagcttttaaatatctatatctatttttcacttttacattctagttttatacttatttacatttattttttatctttttctattatactacaaatttcttaaaaaaaagaagttatctcaaaagtaaaaactcctagaaaaaataacctctttttttttatttaataattaaattcttaaactatacaatcaacttaatttctattcagctatattgtaaacttttaactcatctttatttaaatgtttcttcttaacttctactaaagcttttagtgtatccaaagatgtcattatttcagtagaaaattcaatagctgttcttcttatcttaaatccatctcttgtagagtcatttcctttagttggtgtatttattactatatcaacttgtttatttcttatagcatctaatatgtttggtctagattcttctactctatttactatatcagcctctattccattttctcttaaactcttcgctgttccttctgtagcaacaaaagtatatcctaattctttcatatcttttgctatctctataaactcatctttatcatgattatttacagtagcaagtactactcctctttcatcagacatatgtctacctgctgccaagaaccctttatataaggcttcttctaaattttctcctacacctaggacttctcctgtagacttcatttcaggtcctagacttacttcaactttagataatttagacattgagaatactggtacttttactgatactaattttggctctttgtaaactcctgtaccatatcctaaatcctttaatttagctcctaacatacacttagtagccaagtcaactattggtactccacttactttacttatatatggaactgttctactagctctagggttaacctcaattatatataattcattttgaaattctataaattgtatattaaccataccaagcacattaaggtctaaagctatttttttagtgtattctactatcttttcttttatttcatcagatatattttgacttggatacattgttgtactatctccagagtgaactccagctctttctaaatgttccattataccaggtatcaatatatcttccttatcacatatagcatctacttctatttctctaccagttagatatttatctataagtactggatttttatggtctctatcaaatgcatcttgtagatattgagataatttttcttcgttataagttatttccataccttgaccaccaagtacataagatggtctaactaatactggataacctaattcattagcaacttcaataccttcgttaagtgaccatacaccctttccttttggtctatttatatctagtctctctagtaaatcatcaaatttttctctatcttctgctgcatctatatcatcaaaatctgttcccagtataggtatatttttttcatgtaaaaacttagccaattttatagctgtttgcccaccaaactgtagtattacaccttctggcttttctttttctattatacttaaaacttcttcttctgttaatggttcaaaatacagcttatctgatgtatcaaagtctgtacttacagtttcagggttattgtttatgattatagtttctatgtccatttttcttaaagattttacacaatgaactgaacaatagtcaaattctataccttgacctattcttattggaccagaacctaatactatcacctttttcttatcactaacaactacctcatcatattgctcataagttgaataatagtaaggagatatagcatctatctcacctgcacaagtatcaaccattttatatgctggtttgatattgtatagacttctcaattcatataatttttctggacttatcttcattaagtcagatatacctttatcagagaatccctttttctttaattcaagaagatagtctttagttaaatcttcaattttcataacttttaatttttcttcttgctctactatccatttaaatttatttataaaccatttatctatacctgtaatttgttctatcatctctactttatagcctcttcttatcatttcagctaagtcaaatagtctctcatcatcaggtactacaactcttttctttaattcctcaatgcttctctcctcagatggtgtgtgaactaatgaatattttcctgtttcaagtgatcttatccctttaagaatagcagcctcaaagttacttcctatactcataatttcaccagttgccatcatcttagttcctaattttctatttgcttttttaaatttatcaaaaggccattttggtatttttgccaccacataatctatagttggttcaaaacaagcataagtttttttagttactgcattttctatctcatctaaagtataacctaaagctatttttgatgaaactttagctattggatatcctgtagcttttgatgctaaagctgatgatctactaactcttggatttatctctataactgcatattcaaaactatgtggattaagtgcaaattgaacgttacaaccaccttgaacttctactgcatttaatatatctaaagatgcttttttaagcattgcacattctttgttacttaaagtttgagttggagcaacaactatactgtctcctgtatgaactccgactgggtctatattttccatgttacatacaactatacaatttccctttgaatctcttattacctcatattctatttctttccaaccttttatactcttttcaattaatacttgtccaacaggacttaattgtagaccatgtgaaagtatttctcttaattcttcctcattatcagctataccaccaccagttccacctagtgtgtatgctggtcttacaactactggataaccaattgtaagtgcataatcaagacctgcttgtaaatctgtaactatatcactaactattacaggctgatttatttctttcattacttctctaaatatatctctatcttcaccttttttgatagattctactgaagtacctattatctttactccatatttatctagtatgcctttttcataaagttcaactgctaggtttagccctgtttgtccacccatacctgcaagtaaactgtctggtctttctttttctattattttttctataaattctattgttaatggttctatatatattttatctgccacttctttatcagtcattatagtggctggattactatttattaatacaacttcaatcccttcctctttcaaagactggcaagcttgtgttcctgaatagtcaaactctgcagcttgacctattattattggtcctgaccctaatactaaagttttctttatactatctaatttaggcataaatttttctccttatctaaatggtttttactatctgtaaataatactaaatctatattaatgctaagaatttattaaatatacaatctaaatcttcttttgttgtgtattctggaatgtactgaacactatatattggtaattccttatgtctcattccttctatagtattgtcatttaaatttatgtgagttacctctgtattttctggcatttctgaaacattatatccatgattttgagaagttataaatacctttccagtttctaaacatttaactgggtgattacctcctctatgtccaaatacaagctttgaagtctttcctcctaatgccaatgctaaaatttgatgtcctaaacctattcctgtcaatggctttttgcctattaatttttttatattttcaactatatcatttatatcctctggatttcctggtccattagataataagattaagtcaggatttatatttaaaatttcttctactgtagtcattgctggtgctatagttatatcacagttacaagctttaagagactctagtacactatttttaacaccaaagtctataactacaactttagctccagtaccttttatattttcaatttcttttcttgtaacattttttactgaatctttgttacaatgctcttctaatttagactgaacatcttgtaatgatacattttctaaagttataattcctctcttagttccattgtttctaataattttagttaatgctcttgtatctattccttcaagtcctattaccttattttgctttagatatgtgtctatatccatttcacatctaaaattatttgggttatcacttttttctcttacaataagtccttttacttgcaccttatttgattcaacatcttctaaatttattccatagtttcctataagtggataagtcatagtaactatttgtccataataagttgcgtctgtcaatatttctccatacccagccattgaagtattaaatacaacttctccaatagcttcctttagatatccaaatgcttttccttcaaatactgttccatcttctaaaattaatttccccttcatataagctacctcccaaatattttatctaagcattttctatttctcttacaatattaatagctgattctcttggattttctgcttttgttataggtcttccaacaactaaataatgagcacctttttttattgcatctgatggagttacaactcttttttggtctccaacctctgctgatttaggtcttattcctgggcaaactgttataaaatcagctccacatgcttctactattttatctacttcttgcgctgaacaaacaaccccatctatgcctgattcttttgccagtttagctctctttatagctaactcttctgttgtcatattacatcctatgtcctgtaaatcttggttacttaatgaagttaaaactgttactccaactactaatggcttttctatatttaatctttctgcttcttccctagcaattagtgcacattgtctcattccttccatatctgatacatgtattgtcattaaccaaacattatctctcactgcagctctcactgcacttttcatagtatttggtatatcatggaatttaaggtctaaaaatatttttttccctttttctttaagataatctattgttttaccttttgtggcaacgtattgctctagacctaccttaaatatgtctacactatcttctaatctgtctattagttctttagctttatcaaattcgtcagtatcaattgcaactatcaatttttctttaccatttatcatttttacatctcctttttaataaagcctaaataatcataaaaaaatcctcacaccaaaagaggcataaggattttatctatacataactccattcattagctatgagatatctttcccagtctctctggactagtttaaaagactttattatatttaaatttttattttatactcatcaaaaacctctagaagatttactagaggttatatactaacattatctataaccctttagtctctctggactactttaaggaatttagctgtaatatttttctttatttatataactttatgtatctataggataatttaaagttttatcttttttataattaaaccactaattgctttttatgtcaataagtctttgaattattcttcatctttatcaaacaattttttctcaaaatatgattctgcattatatattgcagcaactggattatgcccagttactctatctttgacaactaaagttgttataggagcttccatatatttcatggctaaagtatcgtgaccaacacataatccaagaattacattaaggtcaaccttagcttcatttaaaaataaagcttgtcctattggattgcacattacctcatctgaacactttgatattgtttgagatgcttctagtccaattgtactcttaggcattgccccatttttacatataacagaaaatacttcaaacccatgatgttcaaatattttttgtgctgtttgcatttctctttttagtccaatacaaaatgctatgccaatctttttataaccacactttttagcaaactctataatctcttttagtctagtatattgacaatacccctctgcttcaactaatccagcattataagctatttttctattctcttcttcttcataaagttgctttgctttttgttgtagttcaatttctctagttggacatatcttcattaatttatccatatttccattagaacagcctctaagattacattttccacacttatacatatccaatatccccttccaaaattttattcatcttgtgattcttctttttctagagttacattttcttcttgggtttcttcttctggtttcacatgctcgactacagttataaaatatgattttcctattttattccttataggaagtttttcatatgaaacatctattttattttttatacaagctatatcaaaatgtcttaaggctacacctaagctaaccttattcatatcttcacagtgtttcttaggtctcttttcaaataaatgaagacctcgttcatccttatggaaataccacggttgagaattttttacagatggagctcttcttgtcaattctaagatatctttccactttctattcctatttatcttatttatcatatcttttactggctttctatcaggtctagcatatctcgtcctaaacaactcttcattttttgctggatatccaaatgctattattatataaggattttctattttgttttcatcatcttcttctgtttttactccagctagataatctaaatcatcttcctcatcttcttcaaaattcttattcccaatatctacaaattccaagatatcttctctctttaagtttccttccaaccagcaagtagctattcccaatgttgtaaggcgcaaaactacaccttctgtagcaaatcctatattctgtaaatagtcctcacctttgtctgatgtaactactatataatgaggtgcctttactttacattccttacccatcaaaaaatgtattatatgacctctatcaacaacatgtgctttaatatttaaatcttcatttaagtattctaaatttttacaacttctttttatttcttccatcaatggcttttttatcttcttactggaaaaatttcttacagattttctataaaaaatggcttcataaagctccatttatgccctcctaactgaaatcttctgacgtataaactctataaatttatataaatactttatattttttatagttttatttcctttttcctcctgccctattttgaaattcataagaatatctactctagtttaatatagcattcaaaaggcttaaattctaccttatcaatgtctatacattagcataatttttttatttgattttctatgctaatttaaataacaacactagctattacctttttaattaagctttgccagaaaaatttttttcatttataaatatctatctcattattatattataagtttttttcggtattcttgtatagcttttcactaaaaaagtatttttatttctactttaatattattatcaacaaaaaacatactgcttaaataagtttgttatcctcataatctgttttaattaaaatattttttttatttctcaatctataaagtataaatattttgaatatgacccaaaatctaagtaaagttataatattttataagttgttcaatattaaaaacataagtaatgttataatactttataagttattcaatattaaaaatataggaggataaatatgaatttaaatagaaatttagaaaaatacgctgaattagcaataaaagttggagttaacatacagccaggtcaaattctacttataaagtcaccaatagaatgtgctgattttgcaagaaatgcacttaaagaagcatataaatgtggtgctaaaaatgtttatatagagtggtctgatgaagaaagtactcttattaaatacttgtatgctccagatgaagcatttcatgagttccccaaatggacagcagaacaatatgtagatatagcaaaagaaggtggggcatttttatcagtctatgcccaaaatccagatttattaaaagatgttgaccctgaaagagttgcaaattttcagaaggcatctggaaaagctttaaaagaatggcgttcttacactctaactgataaatgtaaatggagtatagtctctgtgccaacaaaagattgggcaaaaaaagtgtttccaaatttatcagaagataaagcaatagaaaaactgtgggatgctatatttaaatgttcaagagtagatggtcaggaccctataaaagcatgggaagaacataatgaaaatcttaaatctaaaatggactttctaaataaaaataactttaaaactttaaaatataaatcctcaaaaactgatttgactctagacttgccaaagggtcatgtttggctaagtggagcatccaaagaccctaatggaataagttttaatccgaatattccaactgaagagatttttggaatgccacataagtttaaagtaaatgggactgtttatagtacaaaacctcttgtttatggtggaaacataattgacaatttcttcttaacatttaaagatggtaaaataatagatttctctgctgaaaagggattagatacactagaaaaacttattgaaacggatgaaggctctcattatttaggagaagttgctcttgttccatacaactcaccaatatccaatacggatataattttttataatactctatatgatgaaaatgcttcttgccactttgcaattggttctgcttataagacttgtctggaaggtggaaacaatttaaaagatgaagaattagatgaacatggtgtaaatgacagtttaacacatgtagattttatgattggttctgctgatatggatattattggtgagacttatgatggaaaacaaatacagatttttaaaaatggtaattgggctttttaacatatgattttaactaaaaagggctaatggaagttataccagacttcccagccctttttaatgttgatgataaatattttttatattaattaatctcattattatagattaattcctattgttttaaacataagtatctaaaacttatatttatattatatataaaatatcctatttagtaaaacctttattttaatttatatgctaaaaatttaactttgctatttcaacagcagactttgcatcctttgaataataatcagcgcccatttcttcagcgtattcttctgtcaaaactgcacctcctacaaatacctttgcatttatctcattatctctcagtgcctgaattgtatctttcatactttgaacagtcgtagtcataagtgcacttaatcctactaattttatatttctctttttagcaacttccactacttcttcaatagggacatctttacctaaatctataacctcatatccataattttctagcattatttttactatatttttcccaatatcatggatatcaccttttactgtagcaactattatttttcctttggatacattattgctacttttacttaataaagtttcctttattgtatttaatgaaacttttaccgtttctgctgattgaatcaattgtggtaaaaatatatctccgctatcatatctttttcctactttatcaagagcaggaattaaaatctcatctaatatgtaattttcatccttctcttttaaaagattcagtgttacattttttgcttcatcttttaatcctctttcaactaaaatatccaatggcaaatctttgtcaatctttgtagatgaatccgatttttttgaattatttatattactatattgatttatatagtttatacatcctttatctgtgttatttaatattttaaaagaattgatagcttccatcatactatattcatttggatttataattgctaaatcaagccctgcccctaaagctaatgttagaaaagaagcattaagtgctttcctatttggaagaccaaatgaaatatttgaaacacctaatatagtttttactcctagtgtctttaccattgttatagcttttatagtttctattgcttcttcttgttgtgctgaaacagttaatgataaacagtctataaatatatcttttggttttatcccacaagaaactgctctattgactatcctttttgctatttcaaatctttcttcagcctttttaggtatccccttttcatcaagtgtaagtccaaccacacatgaaccatactttttaactattggtaatatactttctaaagactcctctttgccatttacagagtttactattgttctaccattataatatctaagtccttgctctaaggcctctacattggaagaatcaacttgtaaaggtgtatctactactgcttgaatctctcttattaattttggcattagttttttttcatcaatctctggaagaccaacatttactccaagtatttgtgctccagcatttacttgttctaagcctaaatttatagcataatcaacattttcattttttaatgcttcttgtagagattttctacctgtgggattcaatctttctccaacaactgtaggcgattgtacttccacaaattttgatggtgaacagactacacatttatcaattttctcgatacatccctttgtaacagaatttatattctcagatatttcttttataaaacttggattcgtaccacaacatccacctattatagtagcaccaacttcaacgaactttttaaccccttcaaaaaattcttttgcatcaacatcatatatagcctctccatcaactatatttggaagacctgcatttgcttgaaccataacagggactgtagctcttgatgctattttttcaactattggtaaaagttgtttaggtcctaatgaacaattaactcctattgcatctacacctagaccttctatagtagccaccatacattctggcatacatccagtaaaacttcttccaccttcatcaaatgtcatagtacagaaaataggtaaatcagagttttcttttgctgctaatacagctactttagcttcatataaatccatcatagtctctattactattacatcaactccagatttaacgccttgtagtacttgtcttttaaatatctcatatgcattatcaaaacttaaagtacccataggctctagcatttctcctataggaccaatatctaaagctacatatcttggtttagtattatctacattttctatagcttttctagccaccaaaacagcattgtcaatcacctcttctacagtatacttactatctaattttagttcattacatccaaaagtatttgtaagaattacattcgaacctgcctctaagtatgctgtatgtatttctataagtttatctggattttgaagaccaaatacttctggattttcacctaactttaaccctttttgttgaagcattgttcccattgcaccatcaaatattaatatattatttttcagatattgtcttatttccacaagagttcgctccttttctatatgtacagtttctatagtttttacaattttcacacgacttttctttcttagatttatttattcttgtattagaaatacctataatagccactactgactttctcggtatcataattccattagaagtaattgttagacctatttgtttttgagcattcaaaacgtttaatatatctatatttttttctattggtaaatctccatatcctgggctatatcgcatagttataaatttatcttggtttaaaaaaaccttttctaaattattttgaacaatgtcacacacttcttctattgctgttgttccacatgaatcaattattagtccttttgttaaatttgaataagagtgtcgtcttatttctttttctatatctatccctatagtagctgccataattacacactcattacattcttttaaaagttcatatacatctttactctctaatgttaaatttgttccctctaattctacaacattatctttatttattctaataggataaatcctagataaatatctaggatttattttatttttagttatagctacacattcatcaatagtatatttaaggtctttatctatctcttgacctctgtattgtaaatatcttaaaacttcactttgatttatgcttatatcttctcttccaattaaattattctccatatatatttaaagaaaatcctttatctaaaacatcttttgcatattcctttgccccaaataaagataagtctctgtagtttccacattctatggctgtagctgctggcattttatctgattcaagaactttttttaatgcttcttctaaaccaatcttaactgttttggcatctacatctccccatagtattaaataaaatcctgttctacatcccattggagataagtctattacaccatctaatgtatctcttaaataagtagctaaaagatgctctaaaccgtgcatagcagcagttccaaaactttctacatttggctgtaaaaatctcaagtcaaatttagttactttatctccctttactccatcaagtacactacactttcttacaaaaggagcttttacttttgtatggtctagcttaaaactttctactttttccattatttaatcctccattatactttaaagtttgttacattaattctaaaaaaaactcttcctatctattattgataagaagagtatattatttcaagtcatctcatcgttgttagcaggaccacctgataaaaggttggtataggatcactgagctaactctctcccctaattcttgataagtatcttattaaactgacttaaattatatatcacttttttatttttgtaaacactttattgttataatatttatatcacataatcgtacttttattttataactaagctgattgtattattggcagttgtacctcaaacacagtttgatatttatcgcttgaaacagtaatttctccatcatgtaaatttacaatattttttgtaatcgcaagacccaatccagaacctccaacatttctatttctcgatttttcaactctataaaatctatcaaatatatttggtaaatctaacactggaattggttctccataatttatcacttttacaaccgccatatcttccattttctctgtgactatatctacataatgcccatcttttccatatttcacagcattagttataagattttcaaatgctcttaccaatttatttggatcagctttcacaattaatttttcttcattaaaattaattctactaaccataaattcttgtttaaaataaatttcaaattgagatactacttgacttaataactctactaaatttatttctattttgtttagttttattgtattattttgcattttagtcaattcgaacaaatcatttataagaacatttaaatttttcgatttttcatatgcaatatcaacataatacatcatctgaacttcatctttatacttaccttcttctatcactcctaaataacccattatggatgtcaaaggtgttcttaagtcatgtgacacatttgttattaaatctgtttttgtctgctgagcttgtctctcttcaatagttatatttctaagttgatggactatattattgattttatgtgctagttcatcaatatcatccttttctttatcctttaatatatctaaatcatactcaatatctatacttttttctaagttaccttcatccattaaatttacagcacttttaatgatttctaatttttgattttttctattagtctttcttataaaatctacaatttgcttatttctcttgtacgatatcatggaataaattgctaatgatgtgattgtaaataaaaatggataaaataaactctctcctataagacttctgaaatctcttaactgatatacaagttgattaattacagatatctcactattgaaatataataattttattatatacatacttgttaaaataagcattgaagttaaagcacagcttattataagatctaatatgggtcgaaacatatgatttaataaacttttatttttcaattttatatcctactccccatacagtatgaattattttttctccatctgtatatttttcaattttatcccttattctgctcatatgaaccattacagtattattagattggtaatatttctctttccataccttttcaaatatttcttctgtactatatactctgcctttattatttgctagtaaatataatatatcaaattctcttgatgtcaaaattatttcatttccagccactgttacactatgtttttccttatctataattactactccaacctttatgacatctttatcttcattattagcaccactaaaataatatgctcttctaatcagtgatttcactctcacagtaagttcaagtgggttaaatggttttgtcaaataatcatctgcaccagtcattatcccttgtattttatccatatcttctgattttgcacttaacataagtattggtatattcaaactttctctaacttttctacaaacttctatcccatccattttaggcatcattatatccaatatcattaaatgaatattttccttttttaaaatatctagagcctcttttccatcttcagctttaattacattatatccactatttaaaagatatatctctataaggtctcttatttccttttcatcatccacaacaagaactgtattattcatttttacacatcctaacttaatctttgtatatagctttattcatataaaattatactatattttagttagtgtaatctataaatttattcatttctaaatttccaatataatacaaattatttacacatttatattatttattttgtaaatattcttctaaagttaatccttttgaataaatttcctcggcagcatccttaccaacatatctaatatgccatggttcatatgctgtacctgttatatcttctttaccttcaggatatcttattataaatccaaacttgtgagcattttctgccaaccatttagcttcttttgtacttccaacaaaccatctttctggatttgttaaatcaatacaaagtccagtttggtgctcactgtaaccaggctttgctacatatgcatctgccttttctcgtccctgagattttacccttcttgtataagtatccagttgagtatcataagatctgtatgctgaagaccctaaaaactgtattccttctgaattagcttgcttaactaaatcttcaactgcctttgcaggttctcctgccatttgtttttcttcctctgttgcttcttcaacaaaaggtatgtttaccttagtaatattttcaggagtatagtttttgctaattccatttgtcttgtttaccaataatatatttgatatactatttgagtgatttttattttgagaatttgcctcaacatcttgttctgaatcatgttgagcagctactattggatctttatctttcttaagtaatctatctttagatataaatacacttataaatactactaaaataatggctcctattaatttaaattttttcataattaaatcttctcctttttgttatgtttgtctataatgttaattttagagtataagacttaagtattttataagtaaatcttaaataaatcttaaatttaatatttttaaaggatggtgataaaatgtctatacaaaaacttctaagtaaagctcgtaaggctatacaagattttgatatgatacaagaaaatgataaaattgcggttggactttctggtggaaaagatagtttaactctacttcatatacttaaaagttatcaaagattttctccacaaaactttgaattgatagccataacattaaatactggaggtgttgataattctccactagataaattgtgtaaagaaataaatgttcctttttatgaatttcaaactgacataaaagaaattgtatttgatataagacaagaaaaaaatccttgtgcattatgtgctaatttaagaagaggtgctttgaacgataatgctaaaaaacttggatgtaataaagtagctcttggtcatcataaagatgatgcaattgagacatttttaatgtctatgttttatgagggtagagtaaattgtttttccccaaagacatacctagatagacaggatttaacagttataagacctatgatttacatagaagagtatatgactaagaaaatttcaaaagattctaactatcctattatcacaaatccctgccctgcaaatggtcatactaggagagagtacataaaaaatcttattgctaatttaaataaagagatgcctgattttaaaagaaatgtatttggcgctttaaataattctgagaaattgtttatatgggataaagagaagataaaaaattttaaataataattaaaatttttaaataaaaaagcaagattgtattaattataaataatctttatataatctacacaatcttacttttttatttattatatgttattatctttaatctatattttaatagttcttaatagtatttattttgtctaatacattaattataacttaaatattttatatattaatttaatatattaattcattcaatctactggtttaatccatttttacagtatatacatctacatattataaaaagcaaaattatattttctaaatattttatgttagattataatattaaattctattatctctggtatattaaaaaatctaaatggtaactttgtacttccaagacccgaactcacatataaatgatttccatttatatcataaaaccctttagtatatttcctcccatatggaggagtaactaatgctcccttaataggtaatcttatttgaccaccatgactatgcccagatagaactaaattcattgtatctttactaagcatatctactaaatctggttcatgtgctaacaataaattaaaatttttattatctatctgactctccagatattttatattaggatttccatttaatatttcatcaacacctaatatattaatatatttatcatcttttaattttatttttttattttcatttactaaaagattgaagttggaatttttcataatctgcctataatacctaggaagtttatacatataatcatgattgccaaatactgaaaattttcccaacctagcattcatacttgataaaatagttgtaatttcatctacacttggatttttattggagtaatcaattaaatcaccagtaaatactattatatctggattcaaagtgttaatcttattagctacttttttgagattcttagttgaataaaaactacctatttgagtatctgaaatttgaactacttttacactttcagatttactctcaattgtatcattttttatcaatgctccattttcacttatattatattttttcacaattaatagactcggctctatcgcaactgagtatataaaaatcaaaataaatattaagataaaaaattttaaaaaatacttaatttttgagttcaaaatatctacctacttatttatttttttaaactatttgcattacagactcaactttgttcatttttctgtcatgcatttttggcttatttgctgaaaaccatttatatgttgctgtaagaccttcttttagtaacacatttggtatataaagcccatgttcaataagcttatttatatcaagattaaagtctatatttctaaatgggaaatacgttctttctctaaactctactttttccatatctacatattttattataggttctttgccaataatttctccacatgtatatataaggtcatcccaagaaattaactgtggatttgtcacattataggcctctcttacatgaggatttttcattatgctttccaatacctttaccaaatccccaatatatataaattgattactaacttgttttccttttggtactggtatcttttcatttttttctattttttcaaagaaataatactctctatataaattattattttcaccatatatgtaagttggtctaataattatatatggtatagggctatttataataaaatcttcagcctcttttttatttaacccatattttccccagttttcattttcacctttctcattttcttcttttatatttcttccactatctttatatactgctcctgctgacaatactatatacttttttaagttatccatgcttataaaatcaatcagattacttacatcttcttttgtatatgctgtcatatcatatatgtaatcatattttcttcctgtgataatgttttccatatcttttcgaacttttctatcacaaattagatgttctttaaaaccattataatctatttcctttttaccatttgtaagtatatcaatttgatacccacatttaatcaagcgcttagcaagtgcagaacctatgaagtcgcttccacccataattaaaatagatttcattttaagtgcatcctcctcttttttaaatgacttccttaactataatatcatatttttaaatatgcgacaccattttgtaatatttttgtctataaaagatatttataacaaaatatcttttatagactctacattttcgacaatataagtaggttcactttcactaagctcttcaaaagaaccatacccatacaatactccaatagaatctatacctatttttttagctccaattatgtcatactttctatctccaaccataataactttatctttatcttttacattacataggtctagtacatattgtataacttcatttttattcactcttgtaccatcaagattgctacctgctatatatttaaaatatctatctatatcaaaatatctaagtatagtttctgcaaaaactgttggcttagaagttgctactaataatattttaccatttttatagagcatttctaatatctctttcatattctcataaattttattttcaaatatccctttatcagcaaaatattctctatacttttcaacagcttctttagcttttttatcttcaaatttataatactccttgaaagtatcatgtaatggtggtcctataaattggtctaagttttccaaatcttcttttatgccaaagctatttaaagaatactgaatagactttgttattccttctttagggtctgtaagtgttccatctaaatcgaataatactatttcataattttttttcatatttcagtcctccatatttgtaaaaagtaatatcttacatattaagtttatctattttaaaaagctatagtaatagaaatttctaatactatagcttaagtacccaattaaatcttatatatttattttaaaaataaatttaaacagctctatttaactgttatagctgaaactggacatccttcttcggcttctttacataaatcttgtaaatctgctggtatttctccttcaattgctactgaatgcccttcatcgctcatactaaaaacgtctggacatgttcctatacatgctccacaagctacacatacatccttatcaacaaatgctttcatactaaaatacctcccctaaaattattattttttaattgttgtttccttagatatttatccaatatataccaatttaaacatatatttattattttatcactattgtttagtttattatagtattttcgtatccatgtctataaacttcactgcttttcatccatgattttacagtatattgcaatcttaattttttatttaaaacaagttcattattattgtagtcttttataatatcattacactcctccattgtgaatattgtaaaatcaccttctcctccaatctttattctgcctttatttccatgtaaatcgaaaatctttgttgggtattcagttactttttctatacacttttctagggatatcccaagttccataattttatttataacatttaaaagagaatagtttacgtctttcatgttttttatatgcatatcagtacttattaggtcaggctctaaaccttgctttattgcttttttaaaaactttaaaatcaaattggtccactccatgacatacatcgaacaatactcctctattctttgcatttattactgattttcttaatgtgccagattctttaaggattccatttgtactatttccatatactggtgtaaccacatctccttttcccaaaatattcattacttcatctatatatgatggatactctcctatatataccactaagggtaaatttaattttttagcaacttgctttgatttcttaattatatctataccactttcattagattgaaatttactcgcttttacttttataccctttatcttttctatatttttttctacaattgactcaaccttgtcaaaatttataacatctaaagaagttgattcattcaatatatttagtccctcatttgtaacatttaaaaaagaatatacttctgttttacactcatccatatacttttttttaaaatcatagtagtttgagggaccagctgtacctgcatcaaatataactgtagaacctttttcaattccaattgaatcagaatccatacctgtaggtaattttctcttataacaatgggtgtgaacatctataaatcctggggaaatatacatattatcggcatttattatctcgaactctttatttgtaagtaatttttcttttcttattttctctttaaggttcaatccaatagcatatattttcccatgtaaaaccaagatatctcttttttcaaatttgataccatctgttggagatattattgtcccatttcttataagtaaatttttcatttattccacatcctaattacaatataatttctctaatagcttttcttacataaagaaaataagcctaaaaataaaaatattttagacttattcactatattatactatattaattatattaaattaaataaaatctttaatttactttaagaagcaattaagtatttgttgctcggcttcttcttcagtaagacctaatgtcatcatctttagtatttggtctcctgcaatctttccaatagctgcttcatgtactaaaagagcatctggatgatttgcagcaatttcaggtatagcactaatttgagaatttcccataattattgaatcacattgaacatgtgcagaacaaagggaatccccaataacacaaggattaaacttttgcttagaattatcttgcccaactgtacgagaaactacttgagcagaagagttttcaccctctaagataaccttcatattagattctgcaacttgattaccatgagttaataatttctcaaatacaactattttagctcctttacctaggtttgcatccatttctcttttagttgaatctacacccttaatttgaattgtttccatttcacaatatgaatcctcatccatattgacaatagtaactggatttaaaattctctttccttctccatcaccttcaccataatgtttttctacatattttaggcgagctcctttacgtaagaaaaatctatgtataccattatgttcactatcatcacaaccacagttatgtataccacacccagcaattataacaacatctgcattttctccaatttcaaaatcattatataccatatcctgtacaccagcctctgttactattactggtatatgtacattttctccttttgtatttggctttactataatatctattccaggtttatcagttttaggaattatagttacattttcagttgaatgtctctctactccttgcccatttttacgtatattgtatgctcctaatggagttccacgaagttcagcaactttttctaaaagatttaaatctattttgttcatttaatttgccttcctttctaattaattcatgtctttcattaattcacaacttgaattaacttgacacatgatttcaggtaatatagcctcttttgttccatggctttttactgaaccatcttgtagaacaattatttcatcagctaactctaatattctttcttggtgagaaattatgattatagtctgattagactcttcatgtattttcttaaaactttcattgagttttccaaagctccaaaggtctatccctgcttcaggttcatcaaatatagaaacctttaaatctctagcaaaaagagttgctatctcaattcttttcatttcccctccagaaagagagttatcaacttcacgatttaaatagtcttttgaacacaatccaacatctgtaaggtattggcaacatacatcagtagacaatggttttccatgagcaagtgtaagtaaattttcaactgtcataccttttattcttggtggttgttgaaatgcgtatcctattcctttttttgctctttctgtaatactaagatttgttatatcttctccatctaaaattatctgaccactcgtagctttttcaattcccataataagcttagcaattgtagattttcctccaccatttggacctgtgataacaataagttttcccctctcaaatgaaaggctaacatcatttattattcctagttcctcattgttagactcaacattaaaggaaagattttttatttcaagcataatacccctcttttctataaaatattacattaatatccattcttttattatatcagtaatttttatatatcagcaactctaagcagataaaatgtatattaaataataaaacaaagttattgaaaagtaaaaaagatgagttttatgtaaactcatctcagaaatttagtatatcaacttatatgtatttaaaatttaaccttctatatactctaatattattttttgattatcttttaacataatttcttcttttttagattctattccattcttttttatctttacctcagctacaaaggcatcattaccttcaaccatttctaatagttcatacgcttttttacgacctattttagttgctatatcttttagtactgccattttcttaaacattttatcacctctactcaaaatttacacttaatttttaattatataattctaatcctagactagtttataataattattgtctctaattatatcagatattgagtaaatttaatactttgtaaaattatttatcctctctgactaaataatcatttccatcttggtctttaaaagaaaacatccttccatatggcatctccattaattccccaacttcaacctcgttatttgccatttgttcataagttccattaatatctcttgtacttaaaattattgatggatgagatacatttatctctttgttttgcttcatcattagatttttatcatacaacacaaatgttgtaaattcatttttacttggtgctacttccacccatttcatatttggacccatttccttttcataagttactacaaagttcaatttttctgtccaaaacaactttgcatcctcttgattatttacatagagagttatttttcctattttatttatcataacaatacccacctttattattaaataaatacctaatattttttatatttaataatatacccatatatattattttctatagatatatatttctaatatttatcgccaaattatgtaattctgctcaatatataatttataatatccatactattatagcctttatttatgtaatttaataaccttatatatcatacttataattatgataataactacataaaaaatcacttctaaatagagttatccatctaaaagtgatttcatatattctatgcaactttgtgttttagccactttgttcctcttaatcttaaacaatataaagtccctctaacaagccaatcagtatacatacctatccaaattcctaacactccaaattctaatacaacccccaatacgtaacctgtaaaaattctaaaaatccacatacctattactgcagtcatcattgtatatctagtatcaccggctccctttagccctgctgataatacaaaggatataggccatattaccatagctaaacaatcacttcgaattaattgtgttgagatgtcaattacactagcattttgagtatacatacttgaaatccagggtgcaattggtataaatatagctcctactataaataaacaaattgttgcaaatttagttaaatataataaagtactcttagctcctttaatatctccacgtcctatatactgtcccaccaaagttgtagcagacaaagctaaagcattcccaattacatttattatggatgcaattgacattcctattgcattggatgcaattgctgatgttcccatagtaactataaatacttgaacaatcaatttacctgcattaaaaagtagttgttcaactccagctggtatccctatattaaatatagacttttgagtttcaacatcaatcttaaatggaaatattttacccatagatataaattcatttcctttaaataaagctcttataattactatacatccaattattctagctatagcaatagatatagctgcacctgttatgccataggatggtgtttgcaaatttattcctagaggatttaaatcaataccatatataagtatatatcctaatgttacatttactatattcataaacatagtcacatacataggtttctttacatctccacaccctcttaaaataccatttgctatttgttgtgtcgcaataaatggatacgtaaataatgtaaactctatgtataattttgcatttgattttaccaattcttctgctgaaccataaaataaattaattacaccagttctaaaaacccacatcaatattgttattgtaaaggataatattactccagacactagagcctgcttaatagtttcattcaccttttcactatctttttttcctatttgttgagctacaacgacagtagctccaacagataatgcagcaaatacagatataaatatattgtttattgaatcaaccattccaactgcagatacagcttcttccccaatatgacctgccattattgtattaaatactcctaaaagcatgacaaacgtctgctctatcattataggaattgctaactttataacatttttccttataaacatccctattcctcttttccctctttatataaatttaatttttaattagtttatcgaactgtaaattgacaatgcaaagtttagaattgtattgttcgcattataatatactgctttcaaataatataaatcttgtttaatatcatttgaacacagtatatctttataattatcttatgtttattattttttatggataccacatttaaaatatttattaatttaatataaatattttccgttattattaaaagtagctatatttcgttaatattgtatcactatcgtgtagcaataacaataagtacattttatatattttttataatattatttaatcatccaaacttttaccactttttcaatatataaaatattacactttagatgtaacaaaatcgcatccatttaaatattgtattttatagactaattttaggatgtgatactttggttaatttaaatgcaaataatctaaatgtaaatatggtttatcctatttcttccacagcacccatacgtttcagaagatatactgtttcatatttagaaaacatggaaaatatttatttaactatagcaacatactttgatacacttggtttaggcacaatgaatatcgacaaagtttatggtcaatgggcttggtttactgataatatatatgatttaaatctatttgtttttgtaggaaattatccttatcaaattgctaaaaacagatatgatacatttgtagatattttgccagtagctattacttctattgtcaatggagatagagtatttttaatttcaaatccttgtttgttaaattcaaaaattacagttagatttatatctagtcatcctactcttaatagaacagttgattatggcaatattagagattttattttttaaaactgcaacatgatgtgctattaaaaaataccctaaatttaatgatattattaaataactagaatatttttaattggcacatcatgcctagctattataaattcataatattattttacttaagataagtactgtattttatctacttgtatatttttatttacctagtttctcagttctatatcctatttctttattagctagcttataaccttcttgtatcatttcttctctcgttaatgcactccctaataaattgtcaatactcagttgctctctatcactaaaatacttatccaataatgattcctctatatcttcctgatatgccaaatttccttcatgcattatatattttacatcgaaaccttctttatttaatacttttcccaccaaaatacttctatgacatcttataggttcttgcatagctcctaataaaactatcctataacccatttgacaacccttttttaatctttctattccgtttaaaaaaatatcttcttttgctactttctcaaaatctgcataaccttcttgcgtatatacatctttattatttcttttagctccaaattcttttcccatgtatatatatataaatccggaatttctaagagattcgttaaatgcctctttattgtattgaatattatatttagaatatggagtttctctaatgtcaactacacaatttatgtcatatttttttatcatattaataagcttatcatatggataatttgaatgtcctattgcgaatatttccatataaataccctcctattctttgaaattagtatctatatatgtagatacccgatttacttaaaattaaataaagtattactttaaatacccaatatctttttttcttgatactgtatatttttttactttatatccttaaaaaaatatacaactttatatataaaacatcaatatttatatatattttgtatattaaatacaattatttataaaatctttgataaaaatttataaatagagcatctttagaaaactattaacagaaaaacacactaaaaatttgattatccgctaaaacactgtatctatcggcattatcaaggagctaaacacatcaaaatactactaatttactacgattgaatgagccttgatacgtcctatttcccagatatgcaaagatacggtacagcacatcagtattgaaacaagaaaaattgaatacttcatagactacggaacgcacaatatcagcgttccttttctatttccagccgttcctagtggacggctattttactaccaaaatgaaaggagcatttagaattatgaaaaagatattaaaacgattgtgtacaggctttcttgcctttgcaactgtcgttaccgctttaccgagttcaacggttcatgcgtctaatacacagtattggacggaaagtaaagagcgtgtcagtatcgtagaacaagtaatgaatgacggttctatcagttctacctttaatgagggacatttaaccgttgagggtgaggacgcttattgtatcgacatcaacacagcctttaaaaacggctataagaccaaagctgacgcaagtacccgtatgagtgccgaccagatagctgacgtcgccttatctattgagtatgtgaaacagtacacagacatccacagcggaataagcagtaaacacgcctacctattaagacagcttgttgtctggcagagattaagtgttcagcctgactggcaatgggataatgtgcgagcttcctatgatgaaatcccaaaagccgtacaagatgaagtattcgcaggagcaaaagcctttgtgaaagaaaacaaaggacgttatgactgtggcggatatatctactctggcgagggtcaagagttagggcaattctgggcgaagttagctgtcggaaataccaaacttcaaaagacttccaccaatgccaatattacagacggcaacgggatttattcaatcgctggtgcaacatacggtgtgtattctgataaagactgcacgaaacagcttaccacccttacgactgatactagcggaaatacagaagccgttgaagtaagagccactatagtatatatcaaggaactttctgcaccagcaggatttaaaattgataaaacagtttactctttatctgtggaagttggaaaaacagcgactttaaaagtatctgatacaccaaaagtaacagataccttgattgagctattcaagattgacatggaaacacagaaatccaatccgcagggaaacgcttctttagagggagcagagtttacatggaacttctacgctggatattacaacaaaaacaatcttccagcacagcctacaagaacatgggtaacaaagactatcgctgaaaaagacagcgacggtgctatccattacattactcgtttagctgacaaatataaagtatcttgggacagcttctatacgcaggacggtaaaaacgtacttccattaggaacactaactgttgaggaaacaaaaagtccgtcgggttacttgttagagggtacatatatgcaggctgacggtagcgaagaacagataaaaggaatgtatctgacacagattacagaggacggcgaccttgccgtattatctggaagcaatcaataccatgtttctgataaagtcattcgtggcggtgtgaaaatccagaaacgagatttagaaaccaaagacacgaaagctcaaggcggtgcgactttgaaagataccgcctttgaaatcatttccttaaatgagaatgccgtcttagttgagggcaagttatacaagaaaaatgaagtgttaaagacaatccataccgacattgagggtatcgcttctacttctgctgacctattaccttacggaaaatacagattgtctgaacaaaaaccgccagagggatatttgactgacggtgcaaagccgattgattttgaaatcacagaaaatggaaaaatcgttgatttgactgacgaagcccactctatctataaccagattaaacgtggcgatattgagggcgtaaaaattggtgcaggttcgcacaagcgtcttgcagatgttccgtttaggatcacaagcaagacgacgggcgaaagtcatgttgttgtaactgatgataacggacaattctctactgcttctgattgggcttcccacaagcacaataccaatgcaggaaaaacaagcgaggacggtgtgtggtttggtacttctgaaccagacgacagcaaaggtgcgttgctttatgatacttacatcattgaagaattacgttgtgaaagcaacaaaggtttcaaacttattccaccgtttgagattgtcatttccagaaataaggttgtggttgatttaggtacgctgactgatgaatacgaaaaagaaatcactatccatactactgctaccagcaaggacggcgaaaagactattcttgctgggaaagacgtaactatcactgatacagttaaattagacggtcttaccaaagggacaaaatatcagttgaaaggctggcagatgttaaaagaagaaaatgcagagcttatcatcaatgacaagcgtattgagaatgactacatctttacggctgacagcgaaactatggaagttaaaatcgagtttacctttgacgcttccaatcttggcggtaaacagcttgtaacttttgaggaattatacgatttaagcaatccagacgaacctatcaaagttgcggaacacaaggacattgaggacgacggacagacagttactatcaaggaagtaccagaaacacctaccccagaagaaccagagaagccaaccacaccagatacacctacgaaaacagacagtcccaaaacgggcgacaatacaaatatccttgcctttgcaattatgatgtttgtttctgctggtgggctggctggtacatactttttcaaacaccgtaagatgaagaaatcataaggcggtagctgtatgagaaaagaaaaatcacgctctccgccatagcttagataggcagactatacctattctggcttgtctgccgattacctgcaagaacacggatagtcaagggtgcgttagcatttatttaccctttactatctgggggcttgctggcactttcctaaatgccagaatacacacatcaatcaaacttaaagtaagaaacgaggtaaaataatatggaattaaaatatatcgtgccgaatgtggcacagacttttggaaacttggaatttgcaggggaaaacaaagtagaccagcaacgtatcaatgggcgttacactctcgtatcaagaagttacaacttgtattcggatattcagagagccgacgacattatcgttgtattgcctgcaaaagctggcgagaagcattttaagccagagcagaaagtaaaactgattaacccacgcattaccgcagagggttacaacgtcaaaggacgtggatttacaaactacattttaatggctgatgatatgttaccagcagaaagcaaataagggggtatttgattatgagattaacaaatggaattgtattagataacgaaaaaacttttggagtattgaaattctctgcacttcgacatgaggtgcgtgtagaaaatgaggacggaacgacaagtgatgaaattaagcgtcgtacttatgatttgaaatgtagtgtgcaggaacgcatgatacaagtgtcaatccccgctgatgttcccgtaaaggactttccttataatgcggaagtggagttaatcaatcccgtagctgatacggtggcaaatgccaactttagagggactacggttgattggtacatcaaagctgatgatattgtattgaagaacaaaggcggtcaagctggaaatccgcagaacaacgctccgcagggacagcagaaaaagtaagctgacaaactagtttttcattgtaggagatataaacaactgttataatatggatgtggaaacagttaatttagacttataaaggagaaatgtgtatgctagataaaatacctaatgcagaggaaatgactgctttggtcggacaatcattatatagtgtatggaatgaattgtgtgccttgattgatgaaaagtatgaaatggaatgtctatggaataaaggtggcaaagcatggaattatgaatataagtatcgtcgaggtggcaaaacattatgtgccttatatgctagagaaaattgtgtgggatttatgattatcttaggtaaagatgaacggttaaaattcgatacatatagagataattattcaaaagaagttcagagaatttatgatgaaacaaaaacttaccatgacggaaaatggctgatgtttgagccaacagatacaactttgtttgacgattttgttaaacttttgaggataaaaagaaaaccaaatagaaagtagtttattaccacaccattagcaaatggatagtttcttataatagcggatatatgaaaatgctgtcatgtggacataaagaaaattggaagttgtggaggtagcaaaaatgaaattaaaaaaccctatgttggtagtaactgatatagataaatcagttgagttttataaaaaggtttttggactttatgtcattatggattttggggcaaataaaactttaacaggtggattagccttacagacaagtgaaacatacaaagagtttatcggtacaagtgatatttcttttggtggtaacaattttgaagtctattttgaagaagaagattttgataaatttgctgataggctgaaagaatatgatattgaatatgtccaccctattatagaacattcatggggacagcgtgtagtccgcttttatgacccagataaacatattatcgaagttggagaaaacatgaagatagtgtgcaagcgtttcttaaatagtggaatgacaccagaacaagttgcagaacgtatggatgtacctatgaaatttataaatgcttgtatgcgataaattgaaagttaggagactaatactatgaaaggatttgaacgcaaaaatcaattattttctctttgcggattgaattgcggactatgccctatgcttttgggaaattactgtggcggttgtggcaatggtaatcaatcatgcagaattgcaaaatgtagtcttgaacatggacagattgaatattgctatgaatgcaaacaatatccatgcgaaaaatatcaacacattgatgattatgattctttcatcacgcataaacggcgaaaagcagatttagaaagagcaaaaaacataggcattgagcaatataatcttgaacagcaggaaaaaacacaaattctttcttacttactttctaactataatgacgggcgtagaaagactttcttttgtgtggcagtcaatttattagaactttcagaattacaagaagcaatgaaacaaatacaatccaatgacgaattgaccttactaccatttaaggcacaatgcttgtatgtggtggaggtgtttcagaagattgctgaaaggagaaatataaaactgaaacttttcaagaaaaagtgattttcaaatttgaaattgtaacaaagattatttatatgacgaatgggggaatacctttggaaacagtagagttaagatttcaatatactcaaagtgaatatataaaagcagaaaggcaatatttaatttctagtaaaactatacataaatatgatattgctttagtcgctgtatttttgttgctgtcagtcgtttatatgctgttctcctcttttagcgtatttagtattttaatatttggattgataattgttgtaactgcattgggaagctatttatatatcctaatgcctatactgaaattcaaacaaactgcaaaatatcatgaggaatatacgctggtattttctaaggaaaacattaaatttaaaacacaaagcattgactcagaagtgaagtgggacatttactctgcactatgggaaagccatgatttttattacttaattcaagcaccacgattatatacgttaattcccaaaagaatttttaaagacctaaacgaaaaacagctatttgaagaaattgcacaatcaagagttaaaacaacaaagcatatataatgaacataccctacaatgtaacaacttcatattcatacacacaaagcggttagtcttttaagattgactgcttttttcatacttaaattaagattggagtgattgatttatgcgaatgattttgaataaaggacaccgtatcagagccagagacaagaaccttgtctaccacttttccatagggacgcttctgtttgtatttgtggcggttctcctgctactgaatatcaaacagctcatgcgtaccgactgggaacatttcagcttattggacaatggcttgacgctttccccctacaacttcataaccatattgatagcgactggtatttgtgcattggtcgcttttctgtattaccgcttctgttatgacagtttcaaaaagctcctgcaccgtcaaaagctggcacgaatgatactggaaaacaagtggtatgaagcagataccgtacaagacagcggtttttttactgacctgcaaagcagatcaagggaaaaaatcgtctggtttccaaagatttattatcaaatggaaaacggattgcttcatattcactgtgaaatcacattaggaaaatatcaagaccagcttttgcgattagaggataagctggaaagcggtttgtactgtgagctgaccgacaagaccttgcatgacggctatattgagtacacgcttttatatgacatgatagcgaaccgtatttccattgacgaagtgaaagcagaaaacggctgtcttaggctgatgaaaaatcttgtctgggaatatgacgtactccctcacgctctgatagctggtgggactggtggcggtaagacctactttctgctgacgcttattgaagctctgctacatacgaatgctgtcctttacatcttagacccaaagaacgctgaccttgcagacttaggtacagttatgggaaatgtgtatcataccaaagaagatatgattgattgtgtcaatgccttttatgagggcatggtacaaagaagcgaagaaatgaagcaacacccagactataaaacgggcgaaaactacgcctatcttggtttaccgccctgctttcttatctttgatgaatatgtggcgttttttgaaatgctggggacaaaggaaagcgtaagtttacttagccagttaaagaaaatcgttatgttgggacgacaagctggatatttccttattgttgcctgccagcgtccagacgcaaaatatttctcggacggtatcagagataatttcaatttccgtgttggattggggcgtatcagcgaattgggttacggtatgctctttggttctgatgtgaaaaaacagtttttccagaagcgtatcaaggggcgtggctattgtgatgtgggaacaagtgtcataagtgagttttacacgcctttagtcccgaaaggacatgattttttgcagaccataggctctcttgcattcgtaaggcaggacgggacggcgacgtgcgaagcgaaaggcgacggcacggactagccgttgctggtgtggcgttagccacgccagcagatataagcccctcattatctaacagaggggcacaattacgctggaaactggttcaaaaaccttgaaaagtccgctaggaataaggattttcttagtttttagctagttgtgataatcacttgaaaatatcacaaaatcacaacaatatcacgattgggggtatgacaactgaatgatactgattttctgaacaccttgaaagcaaaacgcagtgattatggcgtatcgcagacaaggcttgcaatcatggctggtatcagccgtgaacatctaagccgtatcgaagctgggaaggtagcactgaccgaggatatgaagcacaaactactggaagcggtggaaaaattcaatcccgacgctcccatgttcctgctctttgattatgtgcgtatccgatttcccacgctggatatacagcacgttatcaaggacattctaaagctgaatatagattatatgcttcacgaagatttcgggcattacaagtacaccgagcattactatatcggggacgtgttcgtttacacttcacaagacaaggaaaaaggtgtcctgctggaactgaaaggaaaaggctgtcgtcagtttgaaagctatctgctggcacaggaaagaagctggtatgacttcctcatggacgcattagttgatggcggtgtgatgaagcgtatcgacctagctatcaacgacagaacgggcttactggatattccagaactgatagagaaatgcaagaacgaggaatgtatttctaaattccgtagcttcaagaactatggttctggggagctggtaaagcacaacgaagccaacaaggacggcatgggacatacgctttacattggttcatttaccagtgaagtgtacttctgtgtctatgaaaagaattatgaacaatcctcaaaattagggataccgattgaggaagtccccattaaaaaccgatttgagatacgtttgaaaaatgagcacgcctactatgccattagagagctgctgacccactacgacgcagagctgacggcattttctattatcaaccagtatatccgctttgccgataaggaagccaacaagcgaaaaagcgactggaaaaccaacgcccgctggtcttggttcattggcgagggacgaccgcccgtgaagctgacgacaaagccagagccttacactctgcaaaggacgctgaactggttacaaagacaggttgcaccgaccttgaaaatgctgaaacagatagacgctggcaatcagatggactatctcaagaccattgaacagcaggcaaagctgacagataagcacaagcagataatcagacagcagacggcttcggtggacgaactgatagaaaaagaaaaggagtgattgatgatgtgggaattgattaaggacttactgctggtatcacttggcatgggtatcggcgtggttctgatgtgtattatgagtgtcggaaaggaagctgaccgacacatgattgaattaaaagaaagcgaggaaaaataaatgaatttcgggcaaaatttatatacatggtttttaagcaacgcccagagcttagtgcttatggcgattgtggttattggtatctacttagggtttaaacgtgagttttcaaaacttatcggcttcttggtggttgccttagttgctgttggattggtattcaatgcaggcggtgtcaaagacgtactcttagaactattcaataagattatcggcgcatagccgtactttttcattatggtttgcggatacgcaaacatacctttcccactttgggagtgggctaaggggaaagggggtaacggaatggtacacagataaaaatacagcataatgaatttcattgcttggctcaaacatagttgatataataaagatatgaaaataataaacgaaagtttttttgataaggagtgatattgtgaaattgtgtattgttttatctccatataaggcttaatggaatagacttgtatggagtgaaatgttatccagagagccttacattttatcaaatttcaaaatgtaaaggagaatgggcatggaatataaatatacaaaaattgatttgaataaatggaatagaggtaaattgtttcaaagctacattgataatatgcgtattgttatgagcttaaccgtagatattgatgtaacaaagtttattgaattttcaaagaagcatgatttaaaattttatccagctatgatatgggctgtttcaaaggttgttaatgaacatgatgagttcaaatatagttgggataataatgggaatttaattaagtgggattatatttctccgtcctatactgaatttcataaagaagatgaaaatttcacaaagatagttacagatttttctgatagcatatttgaatttcataaacgttttatattagatagggagaagtataaaacagaacgtgcatttgtggaaaatcaatctttgaacttttttgatgtatcttgtttaccgtgggtaaaatataatcattttgatgttcatgtttttgacgagggaaaatttcttgcaccagttattacttggggcaaatatgaattagagcaagaaagatatataatgcctcttacaatgaatatacatcatgccgtagcagatggattccatttatccagattttttaatgaagtacaagaattgataaactcaatttaacagctatatacaaagcagttagtctatacgattgactgctttttttcatacctaaatttaagattggagtgattgcttgaaagatatattttcggatatgcaggcaagtatcggctgtacctacatttcagatttaccacatcataaacgtatggtgtggcaggaaatgaagcgactgaaccttgccgattatccgcagaaacaattagaagattttgcaggctatgtctttggtgtcccttacactagcatagctgaagcatgaaagaaaggacgtgaaaacctatgaatgaaatgcgtgtctgtatcgaaagccgactacacacttctgaagaaatccgttccgcatggttcacacttcccattgacgaggaagaactggaagaacagataggcgttcctatcgacagtgaagattaccatatcgttgaaaaggaactgccctttgctgatgaagtcggcgaagatgcgaccattgaaaaactgaatgacctttaccatacctttgaaagtctgcctgccgatttacaagaggactacggggagctgatgtgttactttaccagccttgacgaactgcaccagcaccgccatgatgtgatacattattcatggtgtaaaaacatggctgatgtggcaaggcatttgttggacaatgaccctgctttttctgccatcgaggaacgcctgacccgttactttgattatgaagcctacggacagtatcttgatgataacggagaatttatagaaacagaccacggtatctatgaactgccgtagaagtgaggtgtttctatggtagaggatatgcgtgtatatatcgctaatcttgggaaatacaatgaggggtatctggtcggcgactggttctcttttccgattgacgaagaagatgttgccgagcgtatcggcttgaatgaacggtacgaagaatacgccgtacatgatacggaaaactttcccattgagattggcgaatatatctcgattgaagagctcaatgaaatgtatgaaatgatatgtgagcttcccgactacatcacggacagtttggacgaatttgtatcaaattatggaagtttggaggaactgtacgaccatagggacgatatgattttatacgctggctgtgaggatatgaccgacgttgcctattacttcattgatgaattgcaggcacttggcgatattccccctagtttgcagaactatattgactatgaagcatacggcagggatttatcctttgagggaacttttattgaaacaagatacggtatgtgtgagataccgtggtaagaagctggaagatcagcgacaagcattgttgcttctgacagctttttctattggggacagtctgaaaaacggctgtccttttctattatacgaaaggagttgaaacaaaaacgtgaaaaagattaaaagctacacgggtatctggaacgtggaaaaagtcttgtatgcaatcaatgactttaacctgccctttcctgttacctttacacagattacatggtttgtgataaccgagtttatcatcattctgtttggggacttaccgcccttatccatgattgagggggcatttttaaaatacttcggtattcccgtagctcttacatggttcatgtcgcaaaagacctttgacggcaagaagccgtacagctttttgaaatcacagataacctttgccctacgaccaaagattacttatgcaggaaaagccgtgaaactggataagcaggtactacatgaagctattacggcagtaaggagtgtgagctatgttcccgattaaatatatcgacaacaaccttgtctggaacaaggacaatgaggtgttcgcctactatgagctgataccttacaattacagttttctatccgctgaacagaaattcattgtgcatgacagcttccgacagctaatcgcacaatcccgtgagggcaagatacacgctttgcagattgccacagaaagctcaagccgaagcatacaagaacagtcaaagaagctggttacgggacgactaaaagacgttgcctatcagaagatagacgaacagaccgaagcgttagtatctatgattggggacaatcaagtggactaccgcttttttcttggcttcaagctcatggtaacagaccagagcatgaacctaaagagcgtgaagcaatcggcgtttctcacattcaaggagtttatccatgaagtgaaccacacgctgatgaatgactttgtttccatgccaaatgatgaaatcaaccgctacatgaaaatggaaaagctgttggaaaataaaataagccgacgcttcaaagtaagacgcttagataaaaatgacttcggctatctgattgaacacatctacggcagggacggtgtcgcctatgaagattatgagtatagcttaccgaagaagaaactgaaaaaggaaacgctgataacgcattatgacttgatacgtccgacccgttgccttgtggaagaaagccagcgacatttacgcttggaacatgaggacagcgaaagctacgtttcctactttactgtcaatgcgattgtcggcgagcttgattttccgtccagtgaaatcttctatttccagcaacagcagtttacttttcccgttgataccagcatgaatgtagaaatcgtggaaaaccgaaaagcgttatcgacggttcgcaacaagaaaaaagagctgaaagatttagacaatcatgcataccagtctggcagtgaaaccagctcaaatgtggtagacgcattagacagtgtggacgagctggaaacggatttagaccagtccagagaaagtatgtataagctctcttatgttatccgtgtatctgctccagaccttgacgagttgaaaagacgctgtgatgaagtcaaagacttctacgacgatttgaacgtcaagctggtacgccctgctggcgatatgctggggcttcactctgaatttcttcctgccagcaagcgatacatcaacgattatgtgcagtatgtcaaaagtgattttctagctgggctgggctttggtgcgacacagcagttaggggaaaacacgggtatctatatcggctattctgtcgatacgggacgcaatgtttatctacaaccgtcccttgccagtcaaggcgtaaaagatacggttactaatgctcttgcttctgcctttgtagaaagtcttggcggtggaaaatcattctgtaacaacctgcttgtctactactctgtgctgtttggcggtcaagcggtaatcttagacccaaaatccgagcgtggcaactggaaagaaacgctcccagaaatcgcccatgaaatcaatatcgtgaaccttaccagcgacagagaaaatgcagggcttcttgacccgttcgtgattatgcagaatgtgaaagacgctgaaagtctggcaatcgacatactcacattccttacgggcatttcttcaagggacggcgagaagttccccgtacttagaaaggcagtgcgtgccgttacccagagcgaccagcgaggattgctccatgtgattgaggaattaagaaaagaagatacacctatctcttgcaatattgccgaccatatcgacagcttcacggactacgactttgcacatctgctgttctcggacggtacggtgcaaaatgcaatcagcttagacaaccagctcaatatcattcaagtagccgacttagtgctacccgataaggacacgacctttgaattactgtccgtttccatgctgattgtgattagtacctttgcgttagattttatccactcggatagaagtgttttcaagattgtagaccttgacgaagcatgggcgttcttaaatgtggcacaaggcgaaacgctctctaacaagctggttcgtgctggacgtgccatgaacgcaggcgtttattttgttacacagtcctctggcgacgtgtcaaaggaaagtctgaaaaacaatatcggtttgaaatttgcctttagaagcaccgatattaacgaaataaaacagacccttgaatttttcagcattgacaaagaggacgagaacaaccagaagcgattgcgtgatttggaaaacgggcaatgcttgcttcaagatttatacggacgtgtgggcgtggtgcagatacacccagtctttgaagaattactgcacgcctttgataccagaccgccgatacagcgaaatgaggtggagtgatgaaagaaaggataaaaagtgtgttcacaagaaaaaagatattccgctttctcaaaatggctctgtttgtcgtggcactttcccttatcctgctttcacttttgggaacggtggcacacgcaacgggacttgtggacgacactatcaacaccgagaacctttattccaaatatccgctgtcgaattatcagcttgatttctatgcagataataactgggcgtggttgccgtggaactggctggacgggattggaaaaagtgtgcaatatgggctttactgtattaccaactttgtctggacgataagactatatctaagcaatgcaacgggctatgtagtgcaggaagcctacaagctggactttatcaacgatatggcagacagtatcggaagaagcatacagacccttgcaggcgtaactcaaaatggtttttctacttcgggcttttatgtgggatttcttctgctgattatcttagtcgtaggtatctatgttgcctatacgggactgataaaacgggaaaccagtaaggcactacacgccgttatcaactttgttgtggtgttcgtattatcggcttcttttatcgcctatgctcctgactacatcaagaaagtgaatgacttttcatcagacatcagtaccgcttcactggacttgggaacaaaaatcatgcttcccgacagcgacagcaagggcaaggacagcgtggacttgataagggatagcctattttccatacaagtacaacagccgtggctactgcttcaatttggtaattcgggtatagaggaaatcggggcagaccgtgtcgaagctctcgtatcggcaagcccagaggacgaggacggcaagaccagagaggaagtcgtgaaaacagaaatcgaggacaacgacaacaacaatctgacgatactgcaggtggtaaaccgtttaggtatggtgttcttcctcttgttcttcaacttgggtatcacgatatttgtattcttgcttacgggtatgatgttgttcagccagatactttttatcattttcgctatgtttctgcctatcagctttctattaagtatgataccgagctatgagagcatggcaaaacaagccatagtccgtgtgtttaatacgattatgacaagggcaggtattacactgattgtcacggtagcctttagtatttccagtatgttctacaacatatcgacggactacccgttctttatggtggcgttcttgcagatagtgtattttgcaggtatctacatgaagctgggcgatttaatgagcatgttctctttaaacgctggcgacagtcaaagcatgggacggcgaatattccgcagaccgtatctgttcatgcgacatagggctagacgtatggaacataggcttgcaagagctgttagtgctggtggtgtcgctggtgcggtggctggtggtgtcgttgccagttcaaaatctacacgccagaatggaacaaagaacaatcgtggaaatacaagctccagcatggggcagaaagcaggttcagccgtgggagctgtccttgatacaaagaataaggtcaaggacaaggcaactgctgtcaaagaaaatatcaaagatatgccgacacagactgcctatgcggttcactctgctaaggaaaaggcgaagtccagtgtgtctgatttcaagcgtggcgtggtgcaggaaaaggaaaaccgccagtctggacgcttaaagaagcaacagctacatagacagaatatcgctgacaagcgtatggaacttcaaaaggcacaagaatcaaggcaggcaggtaagaaaacggacggatcagcgacaagcggagctacccgtccccatgaaagaccagctaccacttctaaggttaatgtagaaaaacagcaggaagtcaaacgccctgccatagcttcaaccgtgaagaatgatgaacctatcaagaaaaatgttgtcaaggaacgtccactatcttctggcgatacatcagcaaagaccgtcaatcaagaaaccacaagacagaattacaagactgaccgtgttacgaaaacaaccgttcagaagcatacacagcagaataccgagaagaacaaacgaaccgtattcaagaaaggacaaaagaagaaatgaaactaagacatatcgctattgttggcagtctgttttctatcctcttttctctcgtattattctttggggttctgattagtgccgaggacgacgacgggggcaatggttattcctctaattatgtaggtatgaacctatctgccgaagtcttgaaacatcagcctatggtagaaaagtatgccaaagaaaacggtatttccgagtatgtcaatgtgttgctggtaatcatacaagtggaaagtggcggtacagccgaggacgttatgcaaagctctgaaagtctgggactaccacccaactcactagatacggaaagctcaatcaagcaggggtgtaaatattttgcgtccctgctttcttcctgcaaaaatcaaggtatcagtgatataaatgttgtgatacagtcctataactatggcggtggctatgttggctatgtggcaggaaacggaaaaaagcatatgttcaaccttgcggaaaacttcgcaagggataagtcgggcggtcaaaaagtaacctatacgaaccctatcgccgtggcaaaaaatggtggctggcgttatggctatggaaatatgttctatgtggagcttgtgaaccagtaccttgttgtcaatcaagtatcgggcgagctggcacaaaaggttatgaatgaagccttaaaatatcaaggttggaagtatgtatatggtggcagtaacccgaacacttcttttgattgttcgggactggtacagtggtgctacaacaaagctggcgtatctttaccgagaaccgcacaaaatcagtatgacgcaacccagcatatcccactatcgcaggcaaaggcaggcgatttggtctttttccacagtacctacaatgcaggaagctatgtaacccacgtcggtatctatgtaggaaacactcagatgtatcatgcaggcgaccctatcggatatgccgatttaaacaatgcttattggcaacagtacttgatttgtgctggaagaataaaacagtagaaaggattggaaaccatgtttaaaaagaaagaaaaaccagtaaaagaaacgaaagtccgcactatgaaagtaggcacacataagaaatctgtgattgctctgtgggtggtgcttatcgccagcgtatcatttggcgtgtataagaactttaccgccattgatatgcacacggtacatgaaacggaaaccattcagttaagactaaatgacaccaacggagttgaaaattttgtgaagaacttctgtaagtcctactacacatgggacaacagcaaggaagctatcgaagcaaggacgcaggcaatcagcaactatctgacaaaggagttgcaggacttgaaccttgataccattaggacggatataccgacaagctccactgttacaaatgtactgatttgggatataaaacagtctggaacgaacgattttatcgctacctacgaagtagatcagcagataaaagagggagaacagacaagcaatgtcaaagcaacctataccgtcaaagtccatgtggataaagacggcgatatggttatcgtacagaacccaaccattgcaccagcgattgaaaaatcagactatgagccaaaggcacaagaagccgacgcaagcgtggacgcagataccgtcaatgacgctaccgcatttttggaaactttctttaagctgtatccgacagcaacagaaaaagaacttgcctactatgtggctggcaatgtgcttgaacctatcggcagggactacctctattccgaattagtcaatcctatgtttacggatgacagggataatgtgaaagtcagggttgcggtgaaattcattgataatcagacaaaggcaatgcaggtatcacagtttgagcttgtgttacataaggatagcaactggaaaattattatgtaagatattttgttggcaggctctattttcggatatagtctgccttttctatagcaaatgtgctgcactaacaagcgatttcattgtattttaagcaattaaatctttcttgacaattttatcttaaatcatatatttatggatattgactttctgcttgcaataagttataatatgactataaaactaaattagtcatataggaggcgtgtggtatgtataaagaagttggtatttcttcaaataatgttccgataacactttctatttggtatacagaaagaaatagtcctaccattgtttttttgccgggtactatgtcacaccctctcatgtatgagaattttctatgtggtttgagtgaaagaggatttaatataataggcattcactatctttcacacggaaaaagccctaaaatcaaaaaaaattatacaatggaagatttgctgcataatgtatatgacgcaacgacttacggaatagaaaattttggtgaaaacatagctgtcatgggttccagtcaaggtgggattttagctgcaatggcggcgggtagggacacaaggttaaaagccgtttttccacataatatcatgctgactacattaaaagaaactatgagcttaacaaaataccccgcatggtcacaccgttttatggggctgatacagttgggctttcgtgtaggtggaaaattgctgcctaactataaggttccaggagacgcttatttagactatgacagagtattttatagtgaacaggcaaaacaagattgcttaaatgaccctatgcttttaccctattatcctttaagatttgtcgccagcttatttaatgctgacttatcgtgcttggagaatggggctatacaatgtcctgttattttaattactgccaaaggcgatccgctttttagatttgattataccaacaaagtatttgatttaattcatgtaccgaaaaaggaattacttactttagagcttaatcgtcacatgatttttaatgaggacacggacactacaataaacgcattggaagctaccttgcataaatatcttggatagtatattgattatataatcagtaaatgttatacttttcatgacgataaaaacattttagtcataagggggttatgagtttgccacgatttacggaacaagaaaaagaaatcataaacagtaaacttttgatagagggagaaaagctgttttcattatacggcttaaaaaaagtaacagttgatgatttagcagctgctgtaaacatatcaaaaggttcattctatgctttttatcccagtaaagaacatctatatgtggaaatcaattttcgcttacaaaaagagttatttacaagtatagaaacaactgttaaaaagaaaaagtataagaaccatagagatttagcaaaggacgttattatgctaagtttaacgggggtgattacttcgcctattctttcacagattgatttatctttaatggactatctgcaaagaaaaatatcgtcagatatttttgaaaatcatatgtacagtgatattcgtatattggagatactggaaggtttaggggttgtatttttggttccgcatacggttatcataaaatccctgtattctgttttatcctgtttggaacaattcaaagaggacgaagaattgaatatggtacaaaatcttttagtgaatggtattattcagcaagtagtagcagagtaataattttgtttggttatttgacaggcaagtggccaaacaaattttttacagtttatatgactatatatctataaacgtcataaagttaaaggaggaaagaataatgattgatgtaaaaaaactgtattttagttatactgacaaaccgtttgttgagaatgtaagtttccatgttgggagaggagaaattttcggttttttaggaccctctggtgctggaaaatcaactattcaaaaaattttaactgggcttaatacaagttataaaggcagcgtaaaagttgcaggtacagaaataagggagcatacaaaccggttttatgaaaatattggagtagactttgaattttcaacctgctacgagaaattcacagcacgacaaaatctcgcctattttgcttctctatatgacaagcaacctcggtctattgatgaattattgcatatggtaggcttagaaaatgatggggacaaaaaagttgctgacttttccaaaggtatgcgttctcgcttgaatttcattaaagcgttagtacatgaccctgatatattattccttgatgaacctacaagcggtcttgaccctacaaataatcgtttaatgaaagatattattcttgcggaaaagaaacgcggaaaaacgattatcattactactcacaatatgtatgacgcaacagagctatgtgaccaagtagcctttattgttgccggaaaagtcagtgcattggatagtccacataatttgattatgtcaaggggagctgccaaaatacactatacctactatgataaaggcgagaaaaccggagaatgtctgcttgatagaaccacagaagataagttgttaaaaagtttaatttccgaaaaccgtctgctttctattcatagtagtgagcctacattaaatgatatttttgttgatattacagggaggacacttcaatgagattgggacgtttaatttgtggtgatatacatttccaatggaaatatggtttctattttatctactttatattaacagttttatatgtgtgtgggattgccgctttgacgggacattggaaaacggatattgcttctatcatgatatactctgacccggcagctatgggattgttttttatgggggcgattgtccttttagaaaaaagccaaaaggtattaaatgctatggtagtatcgcctgtaaaagtatcggagtatatactttcaaaaaccatcgcattgattgctatttctacaatcattgcggtgatattgggatttgtttccggcagcaatcatttacttggtatcgcagttggtacagctttgacatcagcaatctttactatgcttggcattatcgcggctacaaaaatttcaaacttgaaccaatttctcattgtgattatgccgatagaaattgtttgctttgttccacctatcgttggtctgtttgtaaagttaccagatatattccgcttttttccgttcacagcttgcatgaacctcataactggaaaaagcattttactatcgtttgatatggtacttgtaattgctacgttgattatcctctacatagttgcgcgacatacagttaagcatatgtggagaagtttgggaggtgtaaagctatgaaaaggatattatccagtaccatacaggtatttaagcaaatcaagagcgaccctatgatgtttgcagcttgttttacgccttttgtcatgggagctttgattaaattcggtattccctttcttgatggaataacagatttttctttgcaaacatactatccgatctttgatttattactttctatcatggctcctgtattgctctgctttgcatttgcaatgattacattagaggaaatcgacgataaagtgtcacggtacttttcgattacccctcttggtaagtcggggtatctctttacaaggttgggagtaccctcaattatttcggcggtcatcgcttttattgtactgttgcttttttcattagaaaagttgtccattggaatgacaatatgtttggcgcttctcggctcagtacaggcaattattgtttcgcttatgattataacattatcaagcaataaattagagggtatggcagttacaaaactagctgcacttacattactcggaataccagctcccttttttattgatagttactaccagttcgcggttggcttccttccatcattttgggtagcgaaagccatgcagaatgaagcggttctttatttctccataggattgatggtagctttggtctggtactacttccttataaaacgtctgtttaggaagctggcaggataagaaggcatattatggaaaaaggtagacttctgcaaaacgaaaatataaataaggctattcaggtttccaaaatcacactaatcatcaacctgggtttatcgctacttaaatttgctgccggatatataggaaagtcaagtgccatgctgtcggacgctgtacactcggcttctgatgtattaagcacaatcgttgtgatggttggaattaaaatatcagaaaaacagcctgataaagaacatccttatgggcatgaacgtatggaatgtgtggcttccattattctctctgttgcattggctataacgggtgctggaataggatattcaggtatcaagaaaatcttttcaggacagtacaatacgctttctgtctctagtggaatcgcacttacggcggcagtcttatccattgttataaaagagtggatgtactggtatacaagaagtgctgcaaagcatacaaattctgacgcacttatggctgacgcatggcatcaccgctctgatgcactctcgtcggttggttccttaattggcattttaggagcacgtttaggctatgctattctcgaccctattgcaagcattgtgatttgcggttgtatcttaaaagctgctttggacattttcaaagaaagcattaacaaaatggtagaccatagttgtgacaatgctactgaaacgaagattagggaagttgtgcttcagcagcaaggggttgatggtattgatgaattaaaaacccgcatgtttggagcgaaaatgtatgtagatattgaaatattagctgatggtaatttagctctttatgacgctcatagaattgctgagggagtccatcaaacgattgaaaacaactttccacaatgtaaacattgtatggtacatgttaatacgaatgaacttccctattctccataggacagggaagatgatttaagactattgaaagggaaaggaggggaagtaggttatggaacaatactggtggattatcattgttatggttttgattgtcgttggcttacttaaaattgtaattatgaagaagtataaccaaaggagaaattctaacaatcgttcaaaaaatagcgaggatgacaagatgtattaagagcaattatccgatggtatgagatatatacctatgaaatttgaacgataaatcccagtttgtaaaagtcaataaatccaaagataaatttgtatttgaaaggagttttgaagaatgaaaaaatatgagtatgtagaaattaattataatgcgaaaggagttgtattcctttgtactgataaacacaaagaaattattgacagttatgcaaaaacggggtatcactacgcagggtttgtacccacagaaattgacgcaaaaggctgtatgcgaaagatagatttaatttttgaaaaagaagattaacttattttagggagttggttctaatgataggacttaaaagacgagatatgaattatattatgaaagttggtgctaaagctcaaggtgtttctgtatctgaatttagggctatgctacaagataccatagacaaaactatggaaagtacagacccagacgtgcaggcaaattttaaacgatactttggaaataagcggccaacaccagaggaatatatttatacgattaccaaaaagacaaaggttaaggtttaaatgttgtaaagggggcttgccgtatgaaacgctttaaatacaattcagtatattcaagcccaatttaacagcatactatttacaattaaatacgctataccagtagctcgtacaaaatttatattttgtgcgggcttttttaatacccgaaaagttttttaattattttcatttttttggaagcaaatcacaccttgctgtacagatatggtgcggaaagagggataaacacttttcaattcatagctggaaaggaggtgagattatgaaaccgtctgacttccaaaaaacaattcagtgtcagtttgaatgtaagctgaaaaaagttgtcaaaggtattatctggaactaccgcaaagaattaagacgaagaaaaaacaaggaaatatcttttagcgaattaccagacattacggtagaaagtctggcaacatgggacgactacgaaacaaactacacaatttttaatgtgtgtggcatagatattaaagtccttgatgatgaacttgcagaagctctcaaacagctacccgaaaaaaacgtaacaatgtattgatgtattacttcttggaaatgagtgatacagagattgcagatattatgaattataccagagaggctgtgttcaaacacagacaccgtgcactagaaactatgaaagagatactaaatgaaaagacaagacagtaaaggacgcaatttgcgtcttggagagagccagagaaaagacggaagatacgtttataaatataccgatatattcgggaagccacagtttgtatattcttggaagcttgtacccacagacaagacacctgctggaaaacgtgatgatatatcgttgagggaaaaagaaaagcagataaaaaaagaccttgacgacggtatcgacacggtgggcggtaaaatgacagtctgccagctttacgaaaaaaagaacaatcaaagaaagaacatcaagagaaacacggaattaggacgacagtatcttgtgaacgcactggaaaatgacccattgggtatgagggcgattgatacggtcaagcagtccgacgctaaagaatgggctatcagaatgaatggcaaaggttattcttacaagacgatagataactataagcgttccctaaaggcttcattctatatggcgatacaagacgactgtatcagaaaaaatccttttaattccaagttgagtgatgttctggaagatgatacggaagcaaaggttatcctgacaccagagcaggaagaaaaactccttgcctttatggaaacagataatgtttacagcaagtatcgtgatgaagttattcttctgctggaaacgggacttcgtatctctgaattatgcggactgacaacacacattgatatgcttaaccgtgtgattaacatagaccaccagctattgcgtgatacagaggtgggctactatatttccaaagctaagacaaaaaacggtaagcgagagcttccattaacagaaagagcatatcaagcactcaagcgaattttaaagaaccgaggaaaagcacaaccgcttgttgttggtggttatagcaatttcttattcttgaaccgtgagggattgccaaaggtagcaggaaattatgaaagtatggtgcgtgggttgattaagaagtacaacaagacccataaggacaagttaccaaacatcacgccccattcattcagacatacttactgtacgaacatggcaaataagggaatgaacccaaacaccctgcaatacatcatgggacacgcaaacataaccatgacattagggtattatgctcacggtactttccagtctgcaaaggcagagttagaaaggctggcttcttaatatcgaaaatgtatcttactacttatttactacttttggttgcattttcatgctggtaaatgccagcttatgcaaggtatcttccaaaaagaaaatgcccatacagcccgaaaatgcgggatatatcggcatctaccaacttatgaaaagataatcagaaatttagtaagtttttataataaaaaaataagaggctgtccaaaaatagagataagccttttttcataatcggaattataaaaatacacttgatttcatatgaaaaagagtgtctcataaactaaaaagtttactttgagacactaccttttttattcttatttatactttgtagacatattataatatgcgtttcactggtatctgaacttctgtcaaccagtcttcttcactctctttattccatataccatctatataagattctctaggatttccaaccactttatatttattgtcctctatccatttaaatgcatctgcataagtttttcctaatgttgaatatggaccattgtgtaatatacaaactgcattttcaactgcatctaattctttaaattttaatatatccgtatcttcctttaaatcatttatagcttgacacatttcaacatccatatcagtctctctatattcaccatcatgatatatattaaaacaataatcaggaactgcacatgtacaccctgttttcatcatttcttcagccattacatttggaaatagattaaaaagttcatcatatccctttaacacttttctcatagaagcaactttaacttttggtaaagacttaataattacatcattcatattgacttctcctttcaaattcataaggtaattacgtagtttaattattttatattcttcacttttaattacatccaacatttctttttctttattcattaaaatattttcaacttcttcaggattttctacagctttttttatctcagctaatgataaacccatttgttttaaagttattatctgatgtaatttaggtaattgctctgttgtataatacctatattttgtaaattcatctacatattctggttttaacaaccctatatcttcataataccttaatgtctttgtagttattttatttattttagaaaacattcctatagaaaacatctcatcacctgcgcattagatttgattaatttaagtttaaactttccccttaggttaaagtcaatacaaaataaattataattgtattaattcttcaattctatctccactcaataccaaaatatcccctgtttttataatggttgaacctttaggtattaaaacctgttcctttctttttatcataactattaatatatcgtctggtatattagaatctattatactcttattagcccatttattaccctcatcaacatttacttcgataagtttagagctaatttccccatcataatcattaaatgtttttaatacaggtgtattatcatcaactaaatccaactttctggctacagttggtatcaatgaaccttgtattcctactgaaagcaacgctataaaaaatattatatggaatatgtcattctctatggctactccttgagtaacagcataaattgcaaaaactactgaagccgcacctctaagacctacccacgatatgaataatttttctttatttgagaatttaaattttgctagaactataaatgttgctaatggtcttgcaataactatcatgaatatagatatggccattgctataccaaatacatttggtaacttagaagggaaagataacaatcctaacataaagaataacattatttgcataatccatgaaattccatcaaagaaatgaaccaaactttttttaagaggtatcctactatttcctataataatacctgaaatgtaaacacttaaatatccatttcctccaagatactcgctaaatgcataagaaagtattgcaatagctgttataaatatagtataaaatccttctatctcgaagtttgaatgccttaaaatataaacagataattttgctagtataaatcctatagctaacccaaaagctatttgttttattaccattggtgcaataagttctaccccagaattattcatcaatgtcaaaagaattagtgtcaacatatacgctattgggtcattacttccactttcaacttctaataatgatgcaagtgaaccccttaagtttagtttttgtgaacgcaacacagcaaacacagatgcagcatctgttgaagctgcaattgccccaattaataaaccttcaagtaaactagttcctattaccatgtggcaaaacatacctgtaaccccagacgtaattattacacccagtgaagacattaatatagaaggtatagcaacaggtttagccatattccagtttgttccaaaccctccaaaaaacattataaatattagtccaatagaacataattgttttgttaattcatagttctgaacctcccatgactaaagtcacagagttcctgcttcatagaattttgcatactaaaatatgtcttactaattctccacaggctatccccatagttcctacggttcttacataagttatttattttgaattgttattagtcttaatccttcttttaatatatttatacttgcatttatatctctatcgtgagtttcattacaactaggacaaatccattctcttatatttaagttcttcacttcctcgtttttatacccacatttattgcatatttgtgaacttgcaaagaatttacctacctttacaatttgtctaccatgccaattagccttgtattctaattggcgaataaactctgaccatgacacatcagaaattaagcgagatagtttacaattcctaatcatattctttacttgtaaatcttctatgcaaataatatcattctcttttattaatttagtagatagtttttgtagaaaatcatttctttgattagctatatgttcttgaagtcttgcaacttttaatcttgctttatttctatttaaactaccgattgtctttctcgataattctctttgtaatttagcaagtttgtttaatgacttcttaagatacttaggattttctataaattctccacaacttgagatacaaaattctttaattcctaaatctaaacctatctgattattagtattttcaaatgcttcaatgtctacatcagtacagcataatgatacataatatctaccacttggttctttagatatagtagcattaggtattctacctttaggtacttgtttatcccttatcttaaccataccaagtttaggtagttttatatgttgaccacaatacataatgtttccatttgtaaagttagttttatatgaaaatctattaattttctttgatttaaatttaggaaatcctgccttttttttaaagaatttttcatatgcattatctaaatcttttaaggcgttttgtagtgaaaatttgtcaggttctttaagccactttaattctttttttaagttagtcaaatcagaactacactgtttataagcaaaagtttctttatcgtttttataaacttctattcttttagcaagatacttattatatacaaatctacaacatccaaaagttttgttaattaactcttgctgttttttatttggatacattctaaacttataagctttttccactactgccacctcactttacttgttttttctgattattaatatattttcttatctgctcctctgtattttctgatacagtagcaacgaaataactaggattccaaagatgtctccccataatactggatgtctatatttgacatattatatgcatatcctctaccataagtaacttccatttttcatcacctattataatattaaaatatgcaattacttaaaacaagtattttgaaggttttttatatttatttttaaataacatatataagaacggtaaatcttaacttttatcatttttgaggttgtcgttcacataagttcgctactacctatgcagttctcttatgaacttcttacactttcatgtaagcacagactatatcttatccttcggcattatccgctaaggtctacccacttccactaccaatagcttgtagtgtacttccctcaagaggaatagtcgttgaagtttctcctattcggagcttacctgctgattgcccattttaaagtacttaggatttaaccttataccatctaaccaattttttctactttcgtaactttcacacttaggtttatttcatccttatgttttagtttggttagctttaggggtttccagcaattcaagtagtattggataggttctatcctatctctacatataggtttccctatatgctgactattttagctactaactcatgactaaagtcacaagtgtgcgtagctattttttaatcaaaatagattcctaccattccatcagacccaaataacatccctagtaagataaaaatcaataatattggtactccaaatttatacaataccttgctagaagttatacaaatcaatagtactaacccacttataatcattaattctgtcatagcatcaactccatttcatataaattttgtagattaatttgcatctacaattttattacttattcaaatataacatgacataaattttataagttatggtacataaagttcaacaaaaatttcacaatacattaaaatgtgagtgttatacttaaatttatatatttgttttaattatattcatttaatatttataatttgaattttttttattaatatttcattttttagttgattgtttaatatatttcattttttatagtaattttatatataactacgaaatataaagtaattagataagtaacaagaaactaacatgtaatgttaggtactctagatatgaaatcttaaaacttttaaatattgaaatatttctttatatatattattgtatatttcttataaattattgtcaatttattttttcttaaaaataaaataattgcataatttatttcaaattatgcaatttataaaatttattcccaaaactcttttactgtttcgattatctcactataaggcaataaagtcgcttcgattattgatttatttgtcttttctaaataatacttaatcatataatatccacaagcatatcctgcacaataaggcaaccctactggaaaatatccttgcattttagctatatcatcaccataaagataagatgttatattttgaaatccagtttcttttaaagcactttttattattggctttatataagtatttaatgtttcgatatctgttctactgacccaaggtcctaacatttcctctccaaacatccatgttgcaaaattttctgcaagaccttcatttatcatcatttcttctaatgttatattattattccactctataaactgaaatctaatattgtgattacattcatgtgctattaatactggtaatctattgatagtatattcattaggaaccaatgatagaaatatatatccaggaatcccaccatcaccccagtatccatcacttaatattgtataaggactatttggattcgccaataatattgaatatttatagtccttaatgtttaaatcatacccttcttttataaaagcatttatagagttttctatggtttctttgcaagtgccccaaattttatcagcagataacacatttatattctttttttgcttttcatcaatatccttaggcgataaaacccctaacatttcacttgctataattacatcatatccacctttctgtctagcaactattggaacattcatacacttccacttaaattcaaaaggcttcatcaattcatatctgtatatatcttcttttttgtttattggtgcatccattatcttcttgtatattttatctgagcgaatttctataatattcatatttaccatctcctttaagacaaagtatatacaattacgtagcgtcaatgtcaatatacattttttataatgtcaccttaatctttttattatattttatcctgtaaaccttccgtacatataacatttttttaaattaataaatttgtataatataataataaaaaattatatacttcaaggtttccctatgatacaatttactaaatcataatttagattatcaggtgcaactataaattattctatatcaaggaggatatattggtcatgctaactccatatttaatatttaatggtacttgtgaaaaagcatttaatttttatgctgaggctttcggaggaggaaaaactatatttgcgcgattagacagcaatccaaacaatcctattatgcacgcaagtgttactttcacaaaatacgaaggttgtataatgggtgcggatacagacaagcctgttgtaatttctggcatggcgatttgtgttgttctaccatctcgagaagcgatagaagaaatatctgtaaaacttgccgagggtggtacacttgtacaagaatttttaccacacccaccaccacatcaaaatgatggcgctgctgaagtacttgataggtatgggtatacttggtatttaagtacatagtaaaaataaaaaaactacatctaataatcataatatagaacagataaatttcaatttaatagtgtagtaaaaaagtcgtgtcctaagactgtcacgacttttatttgtataaaaatttaagtaaatatttttgcgaataagtgagaagtataactttaaattaatttcatatgtagtattggaaatgggttaccttgtccatctatttcagacctatcaaacactttaaatcctaagtgaatataaaatcctacagcttttttattctgctcatttacatcaacatattttacattgtatttatctatagcatattttattaattttttaccaataccatttcctctatatttatcttctataaagagcatctcaattttatctttatctattcctataaagccctttattatatcattatcttttatacaaactatattttctacttctttaagtccaatttcaactaatggtatcaaagattcaatatctttttctgttaaaaaatcatgcgttgctcttactgatgattcccagacttgcaacatttcgtcatattctgttgaatttatttgtttcatttcaagaattattccagatttcataaaatttcctccctatatcacttttaattgtataacacttttttatacaaaacttagaaaggactacgaaggttaagtatcatagtcctaattaagtttaaatattatctattatatatttttaacatttattatatactataatctagcaaatttactacaataatccatatcagtttatactaaaggtgcttctatttgagtagtaaaaaggaatttatgacaatgaccatcattaacagtagtttctccacatattaagtgaatgtgtttatcagttccaggtattctaattgctggccctgttgtaacacatatcttatggaaatggtcaaggaaatctacattatcatttattttatgaacatgatttgtacctccatttattggtatagcttcaccagtaacccctgctgcacggtggttatgtctatcctcacattcttctgctaacttaacactttctgaatattcatgaacatgtgtcatttcctcataatcattatagcacttgttgcacttattgtatttataatcatcatacacataatctctttcacatttataattttgataactcatttttatatctctccctatattatattaagaaattcttgtaaagaatctctaatgtataatatgaattaaagtcaaaaaagttcatattttgtaaaattatgtattaatttaattatttctcccagtatttagggcgtattagtgaagctggtaacttcgtactagaatctccttttgcagtatttacttgcaattgtgttaaaaatatactattttcaagattagcacctctaatatcacaatctcttaagtctgctcctattaaatttgccccactcaaatctgtacttcttaaatttgctgctattagaaatctacctcttaaatctgctcctattagatttatttttctaaggtctgctcctattaaatctatatttttacttaattttttcatatttttaagagtagaagtcttgataaatgatttaacctttcccatcacagactcactcgcttgtgataataataaattaacctttgttctatgtgatatgatatccaaattaattatctgttctgggctcatattagttatcttttcagtttcttcaattatcaaatcaatttttgatttgattgtatctgatatatttaatacagatgcttctttaagataccataacatttcatgtaattgtctcataattaaaaacacttcagacatttgatttgttaattctggtgattgcatccagtctatccccttatatgttacttgtgctactttttgacctgaaccaaaacaatcatatgcagtacaccctttaaaacctcgcttcataagactattatgtacagaacatttaaaatctggttgtaaattaatacagggttttcctgattccttatcgataggaaatccatctgaagcagaaaaataaagagctacacaacaaagtccaaaacacttcttacaatcaatctttagctcctcaaataacttattatcatatatatttttatgtatatctatcatattttttctcctcttaagctttatttttaatattatattatctataactaaatgataatcaagtcccttatttaacagttcttattcttaattataatttaaggtattatttattccaatagcatacataagtttctttatacttgtaacaatacctttatactaagacttattttaaatgtagcactgtaataataaattgtttatatactcataatgtatttgataaattgtaaatctttatagaagttgaaatttttaatgattttagaatcaagatataataataaatacaatttataaaatcagaaatatataaattaactatacaaacctaaataacatagcatttaaattcacaatttcagtataaatagtacaaagtatattaatttaaataagattggcttatttgtagaggagagaatattttggtgttcaataaaatttatatttaataaaaccataagaaaatataaagataaataaacaaacttttattacttaatagattcttatggttttatactgtactgaaaaacaataaacactacagcttatttataatattacgcttttttaacaacagaagactttagcttcatagctccaaaaccatctatcttacattctatatcatgtccatctgatgagtcatggattaaacggatatttttcacttttgttccaatctttatagatgatgaacttccttttactttaaggtctctaattactgtaacagaatctccatcatttaatacatttccatttacatctttgataatatttgaatcttcttcagctcccaatcctaatgcccactcatgagagcattctggacaaactaaaagagttccatcttcataagtatattctgaattacatttcgggcaatttggtaaattttccatctttatatgtcctccatttgttatttttaaatttcttattatataaaatttcttttgagcctttatgatatcatattatacttatatttacaaactactaatttacttaatgtttaaattctattcgtattattattaaacttgatttagctgtaatctctttcttatatttattatagttgatattattacaattttataactctatctgcctgctccgataactctaaatcatgagttacaaatacgatagttttaccattcttatttagatttttaagtatatcaaatactatgtctctattttttttatctaaattacctgtaggttcatctgcaaatattacttcacattcttttaatattactcttgctaatgctaccctttgttgttctcctccactcaattcgtatatcttttttttattgtattttctaagacctacagactcaagtgcgtaatttattttttcattatggttgatatttttttgatactttaaagcaattttcaagttattttcaacattttcattctcaattaaagcataattttgaaatagatagccataaaaatccctttgtaaaattcttatctgtttactatttggattttttatattatttattataatatcaccagaattaggtttttctaataatcccattatattaagtaaagttgtcttacctgaaccactatttcctgttatcgctacaaactcgcccttagaaatttctaggttaaatttgtctattatagatttatctttaaattttttagatatatttattaatgaaatcatctttttaatgttctccttttataattttattaaatgaactatttgagataatcttgtctaatacaatagatacaattacttctataactaatatcagaagtccaaataagataatattattacttaaatctactcttgttgatataatgcctattggaataatgtttgttaatattaatgagactattaacaacatacttctagctgtagttgaataaccaaatatttttttaatatataacttatatttatttctttcatagtagctagctactatattgtaggtaatcattaagtttgatattgctattattattatagtaaaaatttcactattcaaatatttttctagtttatttatttctaaaccatactcattataaacagcatgtaaactttggatatgcgcttctacaccttgagcttcaataatgttacttatatctgcaagggcatctaatttcttagaattaaaatatacacatctagatatataagaaagataaaaagaatcatcaatattatctatgtcaattattgctattgggtcatcaatgagattcctattgtcatccataacaagggagttataagtaaaatagctttgattattatctacatatattatattaacatttaaatctgacttctttgttttatttaactctctatttaactctttattgtacatattttctacttctattttttcaaaataaaataattctctaaactcttttttaatctcattttcatgtacttgtaactttttaggaactaataaatttatagtcttatcgtcataatcgattagattaaatatttctttgccatttgagtaaatagggttaactttaagatagtttttatttatttttatatttttaccatattgacttacttctgggtttttaccctttgaatttatttcatacatgtaacttccatcttcaagtttttcaaaattagttgaatctattaagaaagcatctttttcttctaccaaatttttatagaaacctttaatcttggcatttttaattacttcttcctttcctaaagattgttcgcctgtatctttaagagtaagattataaacattttttgctttatcccactcagatagatttcctaactgagtttgtagcatattataatttaaaatacagttatttatggataatataagaaatgatacaaatacaattttcaatgtgaaatgcattatatttacaaaaccataagatttttttccatttagagatagcacatatttagaacttctactattaaaaccaactattaatatagatatcaaaatatttatcaaaatacatataatcgaaaacatagcaaagtataagcatgctctaacacctatatttaattttaaaatatagattatatatattaataatgctgtgacagatgataaaatcataattctaaatatattttttataaccctagcaattatatctagcttagagtatccatttaatcttaaaatagaagcctctctactcacactaattgaataatgtattattgtagccaagaaacaaaggataattagtattaaatctctaattattgaaggatttaagtataaatttgagttaacatatctatcatgtaatcttgctacaaaaatacttctgtctacatttagttctcttaatattttatttattgtatcttcattttgagttgaaatatataagattcctgattctccaacttcacttattttaccaaaatccctaattaaaattgatatgtctttactcatagttgagaatttacctacttgattactattattactattattagtgtttatattactaataaattcatttgaattagtattaggaaattttcctgattttaactttatattgttattcaaacttgtatcagtcgtatatatagataatttttcattattattaaaaacatactttgatatagccacattattttcatctgcaatatctttaatccacttactataatttttatttaactttttataatctttaaacattacagatatacttgttgtatcgttatataaaatattattaatttcattatctttaactatatttagacctaataaagatactattaatagttcaattgtaaataatacatatattatctttttcaattatagctccctcctaattgtttttattctaaaagcaaaatatattttactttagttaaagtataatgctttgtaccttttctaaacaactactatattgtcacattctaaatggcaagtgtctatttcgtcacaaagataaaaataaccttaaaacagttaattttttataatcaactgttttaaggttattttttatttttagcaaacaatattttaatagtggtacaaaattagtataattcattaatatagattctagtatttttagcaatcaactaaaataatatcttatttaaaacaaaatttaatttaagttcaatataaactttacctcaactagaaaatatttcttctaacttaggaattaatgtgtggatatctcgtcaatagaaaactaattcatcctccatgttaaatttctcttatatttttaatgatttcacgaatctttttggcattttcagtaatatcctcaatagttcctttagttaataaaccaccaaatccacatacatcaactccattttctaaccatatatgtaggttttcaagattaattcctccacttgctaaaactggcatatcaggtattggtgtcttaaatacctttactagtttaggtccatagaaatctgatattgggaaagcttttataaaagtcgctcctaaacttagtgcatctactgcctcagtcaatgatgtacatcctggagcataaggaatctgatatctattgcaaatcttcgctacaccttcattgtaatttggtgcaataataaattgagctccatgtaatatagcatgacgagctgtttcactatccaaaactgttcctgctcccacacaaagtatttcaccatactttttattaagcccttgaattatttctccagcattatttagggtataactcatttctataactgttataccaccttttatacatccttcagcaatttcacatgcacggttaagattttcttctcttacaattgcaagagccccacattctgacattcttttggttatattcatctttttcatattatcacctctatactcatcaaaccactttacttattcattaattttagtcatgttttataatatatatattaattatataccagtgtaatttccctatttatattatctattctcactacttttattaagtattgtcctataattttcaactactcgtttaatttcttcaagtacttccccagttggttcagttacaggaagtcgtgcagttccaacattaattccattcaagacaatagttttcttcataacagatggaattgttccaagttttagtatacgtcgaagttcttctatactactttgagctttttgagcttcttccaaatcccctttcataaagttttcatagatagaaataccaatctctgtgaggaagtttgttgttgctgcaacagctccttgactaccagcttttagactatccagaataagtgaatctgagcctgaaaacacactaaaattctcattctgcgttacttcaatataagctttcatgttgtcaagtttaccactactatccttaattccaacaatattctttatctttgataattcacgtactgactctggttcaatattaattccagtcttacctggcatattatacattataataggtaaattaactgaattagcaatagttttgtaatgtaagattaattcctgttgtgttggtgtaacaaagtatggtgtaataatagataatgcacttgctccaatcgcttccattctcttggataaatctataacttcacgagttgaattaccacctgttccaacaaaaacaggtacacgattatttgtatgattaataacaatctttgcaaattcaactttttcatcatctgttaacacatgacattcaccattagtacccaaaataaataatccataaatccccttttcaatcaaataatcaattaatttacatgttgcttgtgaattaatattttgcttttcatcaaatggtgttatcattgcacatataatccctttatatttcataaaattatattccctctctaatagactttccaagacttcctgctggatgccatttcaaatactgctgtgtattaagacctttagcatattgtaatacaacacttaatgattgtaatactattgtttcagctaaaattgaagcacgaggagctttattaagacaatctccttcctgtttaacgcctgcgaacaggaatatatcagaaatattttttaaaaatgaactctcattaccacttacaccaattatttttgctccatttacttttagagtcttaagagttgcttttaactcttgagtttcaccactatttgatattgcaataacaacatctccttcaactacttgaccacttgacccatgtactgcttctgtaccatgcaatatatatgctgatgttccagtagatgaaagcaatgatgaaatatatcctgatacatgtcctggtttaccaataccagtcacatgtacacgtccgtgatttttttcagcttcaagaattaattcgcatgctttatttatagatgtctcatctattgaggcaataaattctgacaattcattagatatattatctaaaaattcagataatgtattttccataagatgtatcctccttgaaatcatagtaactatgactatacttttatataatttagtttaaataggttttataaattgtaaaatattatgtaatatcgaaccaactacgttgtaatcaatattagggaaagttgctccttctataccaagagtcccataaactggatatagtataactggtaaaaatgcaagtaataacccaacaacaaatgacccagcaatagcccctctccatcctcctgaagtattgccaaatattgcagctgtacctcctgagaagaaacatatgtgagcagctggaataattactacaggaaatatactaggaaatgatgccataatagcaattgctaatagaccagcagcatatgctgatataaacccaataataactgcatttggtgcatatggaaatactgttggaacatctagcgcaggacgtgaacctggaatatacttttctgaaatgattacaaatgctgcagttatttcagctaagaacatacgaacacctgacatcaatattgacatacctgccacaaatgtaaatgcctctataagcggaaaaaccaaccaatgtgttgaaccagcaatttcttgagtaaatgcttgaccagcttttaatgttgcaatatagaataagattaacataactatggatagacccattaagaagtctctgaatattgataaccacttaggaaattctatagtctctgttgtatcatctttatgttttgaaaataaacgcccaatataacctgataaaccataaccaatcatgttaaagtgaccaatagcttgttcgtcgccacctgttaattcacgcataaatggttgacagaattgaggtagtgcagcagacataaaccctaagatagttccacctattaaaatagtgattgtattatcaaatccatgtgctttcatgattaaaactaatacacaagaaaagaataaactatgacctgttgtaaagaaaatattcttaaactttgtaatacgtgcaaatactaaatttaatatgaatccaagaattaatgtacatgaaactgcaaaaccatatgtaccttgtgcaagtgctgtagctgcttctggtgaagctataacaccagtaattccaaagccatgttggaacagtttattgaaattttgaagtgctcctgtcatagcagaggcaccaataccaaatatcaaaaaaccgataagtgtttttgaagaccctgtaaatacttcaacggctgatttcttttgaagaatcaatcctatacatgcaactacgccaagcaaaacagcaggtgtactcagcaaactaataataaactccataaatattcctccttatcatattaaatttatccctcttttgaagcaaggaatttttctagtgctgtctttatttcattacggtcaacaatattgtgaatcccaattatatcaaacttcaaatttttattttttaattcttcagcaacatcaattaatgtttctacagcatctccattgaatccatttagtgaatccaatgaaccatgttctacttcaattggaaagttattttccttaataatttgttgagtctttatttttaacattaaacttgagccaactcctgctctacatgcgattaaaattttatacataattaaatcctcctttataattcgtgtgtttttataaaatcaataatttctttagcctctttagcactatctaaaaccttaaaaaactcatcttcttccaatagttcaactagctcagacatagcacgtaaatggctattattgtctattgcacttagacaaaatacatattttacagggtcgttttcgttattcccaaactcaataggactatctaaagtagcaatgcctattgcaatctcttttgacccagcttctggtctagcatgtggaagtgcaacatgttttgtaattactatgtatggtccagatgcttttgctgagttaatcatagcatctacatacccttcagttactttgttattttcaactaatacagaagctgactgtctaatagcttcctcccaattcttagcttttacctttatttttactagtgtttcattagtaatctcacttagcataggcccctctccttccttagatgtaaaattctctatctgtgtaaaataagctaatagctcacttgaaagaatactttcagaggttacatttgcatatttttttattatatccataacctcatctattttaggttgtcttaaataaatatcacctaattgaatatacacttcacgtgtaatcttatatttttcttttgtggtcataacagggcttactttaattactggtacatctgtttttaaaccctctgcgttataattagtagtaaatacgatatctacaggttcacttatattttctaatccaactgattccgacattggtataaagtgtaagtcaggaaataagtttgtaagttctgcatgtaaaatagctgaactaccaacgccatttgaacaaactattaatgctattctttttctaaaaccatcaaattcttttttatttgaaaaaagtgttgcaaagtgcattgtaagatatgctaactcttcttcctgaatttcttctccaaataatccgcaaaactctttcattgcattacttacaattctataaactaatttatattcttcttttactttttcacaaatcggattatagataggtaatttaaataaaagtctatagtaggcaggtctaaaatgagaatataattgtttaaatattttttcttggcttatatagtaaactccgcttaaatatccaaactttgtcatcattttatttacaatttttgaaattacatccttatcttctgtatcttcttcataatttcctaccgatatacctaaaatccaagcactaatatacattatattataaggctttatcttatcctcactcccatatacttctaataattccttagcaaatttatactccttcattgaactcataactgaaatattaggaatatctacattttcctgagtaactattctagttgaatacatccttgcttttagaaagataaatatatatataaattctattaatctatcttcaacaaaagtaatttcatatttttttattagctttaatataatttttttagcctcttcaaaactatctaaattatattctttaataaaaatatcaaatactcttgaacttttctcattagacaaagtttctataatgtttttaataagcactctcctaatttccatctcattgccaactatgtaatatccatttatacgattgttcttaactttaatgttcttcttttcaagctctggtatcaaatccttgaaatcaagatttacagtagacctacttacttttatagaatttataaaatgattaattgaaatatcctccatgttaataaaaagcattaaatacatatataaaagtctttctgtcttactaaaataataagtattcttagaatagtttttttctaaaatttctttaattgctttttttgtttcttttctaacgataatatctttatcagctcttaaacatataagtggtacattttttactttaagcatgtcattgattttatttattctataagtaatttgtctctttgatgaattagactcctcttgtaatccattagttgtaatcaatgtgctatttaataaaatctggagaattgatacaatttctttgtccactaccattaacccctactttcttattaagattagtcttcatattatcattggattctttcatcacctccacaatacttattttatttgagaattttatcgttttcaatttcatttaagtataacttttgttttagattgagacaaaaattaaacttatctaaaatagctactatattacacttatagattttataaataaaaaagggttccttatgtaaagaaaccaaaaaaaatttatttaaagaatcaaagcgatactaattatgcataaattaccataaataaaaggcacattaatttaaaataaaattaatgtgccttatttataattctaatatattaaatttattttttaacttgtagtttaatatcctttttcttcaattaattcatataaataaagtatttaataataaatgttccttatgactttaatattttaaaccaagaaagttaaagtttctctcatataataaattgacacttatctatttcattcttttaagtgtacaataagtcttcttctagcagtaagagtaagtacttcctctacttatcacaaactataatttttatctcattggtatatatccacgatactgtgagtatgcatccatagttgctatatcacctaagaatactgatgcgatattgaattgtggttttaaatatgggaactcctcttcttgtgcccattctggttttttaataaacgactttgtctcttcaaccacagctttataccattcctcttccccttcaaaccatagttctgatacacggtcaaaagcagttgctccataattaatcattattttactactgacaaaacgattaacatagcaacagtttgtaaagtatggcactacctcatcatagaaccatttttctccttcttctttagagataccatctggatacttaatcataaattgccaacgatagtttggtccatcttgtacagtacgtccttttcctctaaagtcttcttcccagtttattggaacaaaagcaaatataaatggtgggcatccattatctccacctactgcacgtcctgcatctccactttctgcattttcatgaacccttttattttctacatctggtatacacccttgccaacgtagaacatccataggcatatattctgtcataattctatttgccatctcaggcatatgttcatctacaagccaataatgttctgttagttgcatcttacgtgcaccaaaacgctcaccttcatttggtgtaggatatgcttgataaaaggcatatttagtacaatatggtccaaaagtgctaatactatctggaatatggtgacgatataaccagtccattaacttaggtctatattcttccttggcaagtcctacatatattaaacttctcattattttaaattcaaaacccatagccattctcctataatcaaagtatattcacatgctttcaatttccctttttcttatctttactcaaaatatatattgtaaacaaatctacacctgcacccacgtaccatactcctactgccatagctacagcaatttgaatacaaatatcttgtaaattaataatattttcacctgtcataatagttagacctatagcccaaccacaaagccatgatggtaggaaaattattttttcaaataaggatgcaattacaactgcaaaaaaacctaatatactaagtgttaaaaataattctaggttttgattgaaattcatatatcccataattaaaatggctaacactgcccataaatctccacaccaaaaaccaaacattatttttaatccatctttttgtttattaccattagttacatataatcctgcacagattagtgctacagctccagtttttattcctatataaggtgctaatactgcccataaaggaggtagtaaagcaatccccatagacagtgttaatatttcttttttctttctatccatttcctatattgtaattagtagcttccctagcttgccttatctccaatagcttaattgctatttgatttacaatcatagatactgcaaaataacttaagtataatggtataaatataacaataaatgctggagttaatccaatcttgtaatatgtaagtaccaaaaaaataactgctaaaataatttcaatttgtttaaaacttggcttttcattcatacaataagcctcctataacatctaacatcccttaaaaaagagtcttagtattttaattattatcctaatgaaactccagcttgcttttctttagttaatggctctataaaattataagatgtttttctttctttaaattcttgtgttttacgaacttctgcataatgaccttccattttcttaatatcatcaccatgtataaacttacctggtaaagtatcatgagcatgacctaattgctcttctggaaaactaaatatagtttttccacttatagtatctaactctccaactataccacatagagcacaaattgcctttttagtacctgactcaaggtagaataatctattgtggcaatgtggacatacaccttcttctccttgatatgaagctttttcaaaatcttttgctgcttcaactatatttaaaccaatttgatgaacttgaacaagccttgtatcatccattactaattcctttgcccatgggaaccaagcattatctataactttccacattggtatgagagctagcatagcatgttcacattgaactcttgtaccccagtcagaacctcctattcccataaatgatattactttatcattaagcattcttgagtctggaatttttcctcctatagcttctgcaacttttgttcctataatgttatttcctctatctgctctgggtccaaaacggtccattatagtatggaataatcctgatgccccttcttcaaaaatagggtctgaaactactataccatctgcatctttcattttgtcaagcaaccattcaaaatcatcttttaatacacacatactacctttcccggataataaagttttaacgcacgcacaacatccagtacaatgtttaatgttaatagatgacatttgaataaattctacttcagcccctgcttctttggcacctttaagtgcaactttacacattgtgtcattatttccattttttgttccaaaagaaatacctagtattttcattttcaactctccctctttagtatttatttaatcttctttcatttttaatatatagaatccatcatctaaagcatctatgatgatgtagcctctatcatcaacgataagatcttctgttactgccaagcgtggtcctgggaatcctgggaaataagattcttctggtgttttatttggatttggtggtataaaatatgctaactctttgatataatatgggtctgatacatcataaacccttagccctgcatggaaataacagcaatatactctatctcctctttgctctaaccatggcttattatccattggttcatgaagattatgtggaccaaatggccctgcttttcctaatcctgcaacattaaagttaggataagggaaatcttttggaacttcaggatatgggaattgagcaattaatgttggttttgttgggtcactaacatcaaccatatgtatattattcatagcttgaacatctgtaatgttatctggtttaaagaactggaatctttctccctcattttgaacaacgactaaatctcttcctggcaatggtaatgctgtatgagttcttgcacctgcaagtctactagaaaatgcaggcataaatggcaattcacctaagcatcttggtcttgttaaatcttcaacatctaatacaactaaaccagctcctccataaccacaatatgcttttccgtctcttacaaatggaggtccatgaagccatcctttatccataaattctgggcaatgaggtgctcctgcatcaaaagttctatttggatatccatctgcatattggtctggtctccaccatttacctatttccactggattattaggatttattatatctatgaccctataaatcagaccttcaaagccaacacaatcacttgataaatgtacatatcttccaccattgtacatgaatctatgaacacccattacatgctttaagccacaatcccaatatcctaaaaacttaggatttaaagggtcttcttttaaactgtatattctaattcctgcttcacacttaatatttgctaatttagcttggtcaacaagtgctcctggtccacttccacaactcattgctactatcattaaatcatctgctatttgaatttttggagttgttgttgtaggatactctttagggtctaacatttgaaaatgttttataaattgtggattataagggtctgtaatatcgctaatcattactccattttttttatttcctccaaaacagcatccatataaatagtatttttcatctcttttgtacagagccatttgaaacattccacaagttccatctaagttattaaaggaacaaacttcaagatttttaatatatccgttatttccgttgccttttgcataaaatttatcttccattttttctcccttcttatttaaagtattatcaattgatatactttcattttatgagacaaacttacttaaatccaatatcgttttcattggaatatataagttattcttattaataaatttataaaatctaatgtaaagatatacttaaaacatatatttttatacaaatattttctaatattctttaaaagtaaattttcttatactataataagctttaattatagataaataaggtttacaaacaatcaagtttaaataggggtgattatttgaatactaaacaattagaatattttatatctgtagcagaaaatctaagttttaccaaaacagcagaaaaattttatatttctcaaactgctgttacacagcaaataaaagctttagaagaacaaataaatgtaactctatttacaagaagtaaacgtcatgttgaactaacaccagccggaaaagtttttttatctgaggcacgtactataataaaaaatatcaatgatgctattgcaaaaacacaacaatttgcacatggtttttttggaactttgagcattggaaccttaataggatatgaaaaaaacaaacttcaacaatacttaaaagaattttctaatacataccctaatatatctatggatatttgtactaatgaaataaccgaacttttaaacttagtaaaaaataattctatggacctcgcttttgttattaatccagaaaatcaaccattaaaagattttgaatataaaactgtagaaagatattctttggtagctcttttacctcctggtcatccactttacaatgaggattctatcgatttaattgaattacaacatgataaatttatttttgtaaaagaaacaggggatgagtatggacaaaagtcaatgatacaaaatagatatcgtgaagcggggtttgtacctaatgtggtacaacgttcaaataatcttaatactattgaatcattggtatcttctaacatgggaatatccattttaccttcattttgtgttacagatacaatgatagaacgtgatattgcaatagtacctataaaagaagtagaaaatagaattgaagttgtggttgtatggaataaaaaaaatacaaatccagcattagaaaagttcatttctataatataaaattaatcaatattaactataaaaatagcattaaccatttttatatggttaatgctattttctactattttattatctaacttttaatttaatatttataatcgttaaaaataactctgtttaacaaatataagcaagtcaaaagtgtgtctaaaaaagataaaaattttattatatacaaatgtattatctcaatatatctattttttcattgttcatcagtctaagtacatgacctgtgcttactaaagaattatccccataagttgtatgagctaacaccgaactagcaaccccaaactcaactatatcttcactcttcatattttccaaatatgaatatataattcctgccacatatccatccccagcaccaactctgtcatatatttctaacttatactccctactttcaaaataaccatcatcatttgatatatatccctttataaatctattattcatatcatcaaatcttctcatagttccagctacaatatctatatcatactcttttttaatcaattctgaactagattttatatttagactatctatattaagtatcttatttatatctctataactagcaaacagcccatgacaatatggtagtattttcttataatcatttactaaatcatcataagtcctttctggatttaatgattgtctaaaattaaaatcaaagaatacttttatccccttttcataagattttctagctagttctaaagcaatctttttaactgaatctgtaagttgcatagcaataccacaaatatggactatatccatttcttctaaacatttatcaatatcataatcttgtaatttactctcacaaaatgaactatttaacctattcaaataagtcacttcagaaggtctttctccatacccattttcaagaaaatacactcctatatgattccctccatatgtgataaagtcatcttttactccaagctttcttatatttgcacttgatgctttacctacattattattaggcaactttgtcaacatataggtattgtatccaaagtttttaagtccagataatatatttaatcccgtgcctgtaattatataatttagttcattggtttgtgttaagaacttgtagtcaggtactgaaagtctcatcattatttcaccaaaagctaatatattcataaatctatcccaataattctttcattattttataaagtactcctatatcttccactttcgtatcacctgtttctttatcaattattgatgtataaacatgaggtataactttttctacaccagcatcaagtgcaatttgaactatctctttgaagttatctaagtctataccccctgttggttctaaataaaaattatgctttgcacaagcttttgcaacttctatatattcatcctttgttttaagccctcccattggaaaaaacttaattgagcttcctcccatatctttcatcatagctattgctgtttctataggaactataccatctttttcttttgaacttaatggacctgtggatatttttacaaatcctggtttaccagttggagaaactaatccatttattatactatcattttgaccaagcaatgctctagatgtagcgacacctgtaaacacttgatttatatgttgtggctgaagttctttagaaatctgagataccatatttgactgatttgggtctccagctccaagacccacagatattgcattatctatttcctttgagtattttttcatatcttcaatagctgcttctacagtgctataattctttgatagtactcctactagtacatgtccatcacaggcatcatatacttctttagcattttttatgcttcctgcaagaacatttaaacaaactctatttttataatattgtggtatacaattcatatttatcccctccattggtaaaattcaatttattaaatcattataatgtcacttactctacactctaactttctactatattttttatcctattataaatattatctaaatcacttccagttacacttcttatatcaatctcaatcttgccttcattagccttatagtctctagtgtatatagctatctctccacttctaagttcatttataatttgttgtgttgacttatttattatatcttcattaaagttaatttctccacgaagtatttctctacctgctgaatctctagttatactagcactcactccctttatagtatttatcttgtctataaatggatttagcttgtcctccatttcttttaaagttactttatcattacttatatatctctcaattgcacatgttagacctacaatattttcttttcctattttcatagctcttcctataccctttgattgaagctttacattatctatgtattttttcttacctattactaaccccgagctaggaccttctatagccttagcaccactgtatatcactaggtctgctcccaattcataatatacatttaaatcttcttctgctgctgcatctactatcaaaggtaaattatattctttagcaacttgtactgcatctaatacacttagcatactcttttgaacacaatgatgagatttaatatacataattgctgctgtattttcatttatctctcttattatatgttccttgttacacatattagcatagccggcctcaacaacttctcctcctccaagtcttatcattacttctactggaactccataatcaacattatgcccctttggaattattatttcccttttaacttgtttcttaggattatttacattgtaaactagactcatatcatcttttgctatcattgctcccacactctgtgcaatcccagcagatgcactagaaactattagtgcactttcacaccctaataaatttgctatatattcacctgttttatttacaagttcttctattataaggaaatttttacacccttcacctattgcttcaataacttccttatctactgttgatactcctagtatagtcattttgcctgaagcatttataacacgtcttacagagtatttttcaaatatactactcatacaatagtttctcccttctactcattctcttctatagagttgcctatatttaaatattctccattgactactactgctcttggctttatagacgtacttgtgattactgacttattcaaagaatcttgaagttctttttcttcattaaccacatcaaatatagttaaatcagcatcatatccttcttttattaaacctttattttttaaacttattgcatctgctgcatttttagtaactttatctattatatcttcaagtgaatagcccatatatataaacttttccattgttgtagatagattatacactggaccatttattctatttttaatatatatatctgtacttatagtgtctggaaaaattcctgcatccttagatttcattgcaatatccatactaaaactttcggttccatgacctacatcaagaattatacctctttctttagcttctatgatttcctttttaacctcattgcctctaagtattccatttggctttccattatatatatgggttaatatatctcctttttccatataatcaaatatatcctctatcgttggaggagaactcccaaagtgaaccatcataggtagattaagttcattttttattcttttagctacttttaaaggttcaacatcatttgaaattacaacacttttactcattctagctttgattccaacaacaaaatctttgtattttctaactgcatttttaagttcatattcatcaatattcatcatatttgaaagttcatcttgagatgttattccctgcttagcaatatttattaaagcatatacattggtcttatactttttagtatcttcataaaattcacctatatctaaagctcctgttgttcctgcatctactacagtagtaactccactttttattccaacctcatctggataatccttataaaggtctagtctttcgtagcagtgtgtatgtatatctatccaacccgcactaataaatttctctccatctaagtttataatttgttttgcctgatacttagaatcatctatatgattttttacttctattattttatcgtctaatatagctatatcaattatacttttatctactgtttttccacattttattaatatgtctatcttcactttactctccctctaaaataatcttaaatttactccaaggttcaataaagtctaaaagtattatttcgtcttcctttattctacccaccttattttttctttcatctgtacaatcttgaagtatcaactgtaattcccctttatactttccaaagtcatcattaccaatcactacatctcctcttttaaagatgttcttattatcatgtttagggaaattttctttagcatatttttttcttacttctgtagatcttgctacctgattagttatatctcctcttctaaagtgttgctcatttaccattattatcttttctacttcagaagttttttctttagctactacattaaatacaacttggtattcatttacttcagacattctttttaattcatcttcacttgcatatgcatttcctacaattacatcatcaatcaatcctgttgcgaataagtgcttagttgctgtagcaatatctaagtttctatgcatttcaagcgtacacagtccatcatttatattccaaggtccgattgttgcgtattttgaattgacaaaagcagcagttcttattccatactttttaaatctatttgagcatcttacaaaaaaatcatatggcaagcctgtacccctttgaggataaaaattgtgacaaccatatatattatttacatttggcttgtaagtaattatattatccaagtatgctacatcattactcatatttagttccacttttaaatcatatggattgaaagaaatcatagcttctttacttccatcatatccatagtcaagccttattccactagcatttaactcactaaagaatgttaaatcatcataagatatttgtaatatatcaaatatgtttggagctatatcaaggattacttcaaatcctaattctcttgcataggttataatctctttaaaatgttttttaacttcttccttaggtcttgtaattgaaagcatgcacataaatattcttttaaatccgtattttgaaaccatttttatatatgccttatcatcttccatgttactatgctctggatatactgatattcctaatcttctttccatctttctcctcctcaaattacattatttaaaatatataaaattaaaggcaaaggtcattcctcctaccttcacccttaataacttataagctttttctatattttatatagtacaaaacctctatatctatgtatttttataaattttcactcatttcttcttgttctctttgtaattgttgtttttcaaaaactttgaagaatggataataaacagcaaatgatatcacaaagttgattaatactaagatacctgctagtatactccagttagtactcattactgctgctattggtgctggcattgcaaatggtaatcttgctaccatcataggtataacccctgtaatagtaagaacatatgatagaattgtcattattataggtccaattataaatggtatccctagtattggattcataactattggtgctccaaatattataggttcatttatgttgaataaccctggtaaaaatcctaatctacctaaactttttagatattgtgacttagaaaacataaacattacaactaatgcaagagtagcccctgctccccctatccatacataccactgtaaaaattgttctgtaaatatgtttggcattgcatgagctgatactccttctgtgaatgcagttatattttctgctatagacatgtcccatataggtcttattactggccccattatagctggaccatgtatcccaagtacccagaataaagttattaggaatactgtcagtagcccaccacctaaactatttcctgataagaatccttttaaaggtgataacatagcgcttagtgcaacacttatatcaaatcctaaaatatgtcttattacccagaataacattaaaattactgctgtcggtaataatgcagtaaatgaatttgaaacctctactggaactcctgctggcatcttaattgtaatattcttttccttcataaaacgatatatttcaactgtaattaatgatgttacgatagctccaaataatgatggcgaattaagttttgccatatccatccatctaccagcttctataactccacctactggttcaactacttgagttggaactattgtagaaactaaaaatgccataactgcaagcataccaacacctgttgtatctaaatcgtagcttttagcaagtgatgatgctatcccaaaagtagcatatagagataaaaatcctacagtatatctaaatggtatatctaatgttgctttaaatggagctataaaatccatataagcatcaataggtatgtttaataatattgtgaaaaatgaccccactattgttagtggtaatgttgctattatacctgctcttacagctctcatatgtctctgattacttatcttcgctgctacaggcataatcttgcgctctaaaaaacttgcgaatttttccatagttatccccctgtattattgatattatcctttatttataatgcaataacgatttcataacataaactaatttttatgtaattgataatatcacttatttattaaaaatattataacattataatgtttggttgtaaacattataatgttataatatttttcgtttttacaactaaacaaaaatcctgagcatattatcatttcaataaactcaggattcttattatatttcgtatttaattacgtagttttgtacttctgtattatatcttgcaaatgatagctcaactatattatcattctcatcataggtctttctttttcttcctaataatatgtctttagctagatttagagcctttgatacctctagttctgattcttctataaaaaattcatcttcaaatctagttatatttatatttctcctatataagtacatatataaagaactttcattattaaaactttcaacagttagattttcatcaaaaggaatataatgagtaaaaaatatatatggcttactatctaagtaatacattctagtaatcttgctacatttttctccaaatatactaaatacttgtgaatttgtatcatttattattttttcaattgaaatagtctttttagataacttatgacctttagataaaagtatacttgaaaaagactctgcttttgatagcttattaaaaagactattacttattacttttgtcccttttccactttttttctctacatacccttctgattctaatatctcaatagcttttctaatagtaattttactgactccaaattcttgctctaattctctttctgttggaatattttcatcaattttatattcgttatttaatattttttgctttaatatatctacaacttgtatatataatggttgatttcttaacatgattcacctcttaaattatatgttataatattataacatataatcttatattattaataataaatatttattaactttaaactaaatataaaaagagtcctcaaaataatcctaatgtattactcactaaatattgaatcaataatctaacaattagtgtgctacacataatgtatcttttaagaactctcttaatttattctctttaatttttatttatcttgtaatttcaaatgtaaatcaacgatttcttcagctaactgttgaaaattcataccattcattaggtggtcctgtgcatgtataagtatgacacttatttcagtcctgtttccactagcttcgttttgtattaattctgtttgatatctatgtgctttatttataacttccttagactcttttaataattcttttgctttttctatatttccattcttagcctcttttattgcttcaaaagctaaccctttaccttcacctgcataacctattatattaaaagatatttctataatcttttcatccatcctttgattctcccaatttatatattaaaaatacattataatttatattacttagtgttgttaagttctatcgctctatttaaaacagcttctccattaactgttccatagtgcatcatatttataacctctactggtatattatatggcttagcaatttcttgagccttaggtaatacatatctaacttgtggtcctagtaataatacatcacatttttctatttcattttgtatagttgattctggtattgcccaaatttgcgactctataccattttctttagctgcactttccattttagtaactaataaacttgtagacattcctgctgaacaggccaacattatttttatcatatattttcctccaaatttttattaacaactatataaacattataatgttataatattttatttaattctaccttaaatgcaatatactttcaatacttttttgttattttaatattattaagtgtcaaattagcaaaaaccgtatcatttatttatgatacggttctccattatttatcctataagccctataaatctgttctaacaatatcaatctcatcatctgatgaggaaaagtcatcttagaaaaggataacctataatcagcccttcctaaaacctcatcagaaagccctaaagaacctcctattataaaacagagactactattacctctaactgctaaatcactcatagtcttagcaagttcttcagaggataaacccttaccatcaatagccaagactataacataactattatgctttatcttccctaaaattttctttccttctttgtcttttataatttccatttccttaacactcaaattctctggagctttttcatcatccaactctataatttctaacttacaatacttagaaagcctttttttgaactcatcaatacctaattttaaatatttttctttaattttacctactactactatacttatattcatatatttctcctaaacttaattttattacaaatctatgcattactagaatttacaagctcttataaaattatatctctttttcttgatttgcatattctacaaactcttcaaaaggtattgctttgctataataatatccttgatatatttcacatcctaaaccatataacttatccctttggtctatattttcaacatactcaacaactatatcaaaatctaaattttttgaaagatttacaatagtcattataatttcactacttcttttatttgtaagtatctctttaactaatgaaccatccaatttaactatatcaaagttattattttgaagatatataagagagctatgccccatcccaaaatcatccataattaactttattcccaagttatgtatcgcattgatacgttcaataattatttgtgaacctgataatgcaatttgctctgttatttctatacctaacatattaggatttatatcattactactaatgatattttttatttgctccggtaacttagggtcatcaagttggtctggagatatatttacagagaacttaacaggatttctcaatagcttttcactcttctttaaatcaatacatgctttattaataatatactctccaagctcatctaagaacccttcttctttagccaaaattataactagtggtggataaatgaaccctcctattgaatgtttccatctaagtaatccctctgctcccacaacatttccattataattgacttgtggttgataaaaaagttctatttctcctcttttcatagcaaacttcaagtctgatgccaacatttttgaaattgaacctattttaccattatggtttagaagattaggctgttcacctgttaattcatacctttttaataagtttgttaaattttctatattattcttaaacatatatgtatatctattttgcgacatttttataaacggaatataaatcataacaccaacacataaattaaatacttgcaacaaactacctcttattgaacctgtagacatatatccacttaaaaatataggtgaggtccattctacagctgaaactgtacatggtacaatacctgtagacatagccacataacttgtaatggttaagattataggagtaattacaaaaggtacaaacataatatagttaaaaacaattggtatcccgaaaactagcatctcattgatattaaaaagagctggtattgaagcaattttagctagctttcttacatttatacgtttttcactaagaaaaattgcaattactaaacatagtaaagagccacatcctcccaataaaaccattgtatcaaaaaaggtcttagtaaaaatttctgttggtaattgattattattaactaaatttatgttaattgccatactattttcaaataaattttttgcgacggtatctaatacattactaccatgaatcccaaaaaaccacataaagtgcattaaaaaaataaacaacagagcactcataaggtttgttcccattttattaaaaacatttgaaaataaattataaaatatatcttgaaagtttgaactgccaattagacttatcattatcactctaaaaatagaaaacaaaaatactactattatgaaaggaactatagccgaaactaccatattaaagtctgcatcagccccttctgtatgaaactttacacttgtaacaaaagattctgtaagttttacaaacaatacagaagatgtcatagaaacaattatagatgtaaataaccactttgtcttaaatatttctatataagaattaagctcattaccatgtgaaaatactaaaaaagagcacattgcaactataggaacaagtactgtatacttgctcccatatatttttccataactatagcttattgttaataatattattaatgaaataattcctaaagtagaatcatttataaagttaagaatatttgtaacctctccattaaacaagcctgataaatattcttgataagcctttattggaagattcaaaattacaagagccgttgaaccagtcataatagcaggtattgctaaaatcataccctgctttatagagtataaaattttattatcctcaacattttcaaaatttctctttagcaaagttattcacctctacttcatctcataaacattagaaacatcatttcgtgatagtacatctagttttacatcttgtccaactactatatcatttgatgctaatactccttttgaagtctcatatgctaactcaggaaaattattttctttacttaaatgtgctaataatatagattctgtaccttcattaataagttcaacgcagaaattagctgcatcttcattggataaatgaccagtacttgacattactcttttctttaaagcatatgtatatgaacccatcataagcatattagggtcataatttgattccaatactactaatttagatttatatagatgtttttttatattttgagttatacatcctatatcagtagctatagacattttttcatcactctctgtataaaaattatatccaactggatcagacgcatcatgttctattgaaaaaggtctcactatgatatcacctaatgagtaggttttatcattttcaaatactttcatatttttatctttgatgtcacctaatttgtccttcatagaacaccatgtttttatattagcaaatactggtatatcgaactttctggataatatacctgctccttttatatggtcaacatgctcatgtgttataaatattccttttaatttatctgcatctacaccaatgtctttaagacctgtagttattctcttgccacttaatcctgcatctactagtatattagtatttttataccctatatagtggcaattcccactactaccactccctactgaacaatactttagcattccttcacctctttttctgccttataaattatattataccaaaaaaacagagtattaaataaaatttaatactctgcacaaaatttacttacattcactatttacttacattcacttataatcttatttatatctacacctttactattccatagttccacaaaagctcttccattagcatttttatgcttatatttattatagtattcatttaaagtctcaaagaatactttatctccaacttcttttcttatttcattaaatgctattgcgccttttgtataaacattcaagctgtattcagtagaatttttatactcatttgctggcttaaatatattttcactcaaataactttttgtctgtatctccatagtttttataagcttgtttgccatatctttaccatacttttgttcaaaataaactattgtagaatattcagtaagtgcttcatctaaccagggttcacttatttcatcatttccaacagcagaataccaccattgatgtgctgtctcatgggcaataacatattctagtaaaaattcatttttttcattatataaactttggtctatcataacaagcatagggtattccatcccccctataaaaaagtcacttgctacaacagaaaattctttgtaaggatactttccaaataattcactaaatatatttattgaatcttttgccacttcagttgcttttttagaaagctttttatttaaattatatgtattgatagctactccctttgaatctactttgtttacatcaaatttactacttagtataaatgcaaaatctctaacgttttcagcttctatttcatatagcattttcttattatcatgtttatcatcaataagttttcctgtatgagcaattttatatttatttggaatcaatagtttcacatgaaaatcgctagtctcactataaaatgggtcgccaatagtttcataactctttaaattccatcccctttcatcatttacacaagctataggaaaccaattagtaacatttatagtattttctccatatccaaatcttccaattgaatttggtatttttacgttatattttatatctaatgacattctttcatttggttttaactctttccctaattctatttctaatatgtcatttttgtctcctttaattttatactccattttactattattatttaatatattctttatatctatatatccttcgttaaatccattaggataagcccttgtcatttcacttttttcaaaaggagcaaaatctttcttggaaaaagcattcggatatatatggaaatatattttatctatgtttgattttgtattatttatgtagtcaacattctgattgcacattaacctcttagtctcatcatcaaatataacatccatattatactgatttatttttgaattagttttttctttgtatgtttctaaactgtcatccttttctataaagcaacctattattaataccataaatagaatcgctactgataatgttcttcttactttttggttgaattttataaccaaaatatctcctccttttcaaaatgaatacttttagaaaatatttacatgctaatcttgtgaccttttatttgtttacagacaaatataatataaaaaatgatataatttaatctgaggtgataaaatgttttttaaagaaagcaatgaaatagatttaggtgaaatcactattcccaatatctttatagatatatttatgccaatggcggacgggttatacgtaaaagtttatcttttaggatatagacaagcatgtgatattacttctaatcctaagttcgacaataattcaatagccaaaaacctaaatataccattgtctgatgtgttatctgcttggaaattctgggaagaaaagaagattataaaaatacatgacaatggagaatatgataattttaattattcaatagaatttttagatttaaaaaatttctatattgagaatatattaagcaataattcatctataaaatctaatacagataaggttgtatctacttctgaaaatccaagtattagaaaaatgtttaattctataaataaaatagttgggcgatatctcgacccaagtgaaaagatgagtattatggatataatgaataaatacaatatgagccccgatatgatactttgcgcatatgaatacgtcaaagataaaactggtacatcaaagccagttaaatacattgaaggcattattagaaattggtatgattcaaatttatatacgccaaaagatgttgaagaaagctttttggtaagaagtgaacgatatattttatataaaacgattttcaatgaattgggattttcaagacaaccatcaaaatcagaaaaagaacttatggacacctggtttgataaatttaatatggatatagatttgataataaatgcatgttctaagtctaagaatatttcaaacccaagtatatcttatataaatggtataattaaaaattggaatgaaaaaaatataaaaaatttaaatgatttaaagcaaaaagaggaagaacgtatagttaaggagaatattaataagaagcagattaatactactcaaaacaacaatacttacaaaaaaactaagtttcataatttcaacgaaacattcactcagtatacctctgatgagctcgatgagattattaaaaaaagtcaaaaagaaaagtttaagtaggtgattaaatgaatgaggataaaataagaaaaatacttgctaaatatgctaagagaagagatgataatgaactcttattagaacatagaaaaaatgaggtatataatagaatccctgagataaaatctatagatgatgaaatttctaaaataggtctcagtttagctaagatagtacttttaaatcccaaatctaaagatgaaattgtaaagaagactaaagagaatatagagtctttaaaagtaaagaaagaaaaacttttatctgaaagtaacatacctcttgattacttggaaataaagtttcaatgtatttcttgtaaagataaaggatttttacctaatggagaaaaatgttcttgcctcaaacaagaaattgtaaatgaagcttataaaatgtctaatttagataggattttaagtcaggaaaatttttcgaattttaacttgaatatattttctcctaagaaaggctctgatggggaaatatctcctagagaaaatatgctaaataatttaagtatctgcgaaaattttgttcatgattttaagaaggataatagtgaaaatctactgttttatggttctactggactaggaaagacctatatgtgcaattgtattgcaaaggaattgttagataaaggaaatgttgtaatctatcaaacttcttttagaattttagatattcttgaagattataaatttagaagagacacaaataaccaaataagtgaagataattataaaaacttgtttgattgtgatttattaataatagatgaccttggaactgaacttaataattcttttactagtggggaaatcttcaatattgtaaatacaagacttgttgctggtaaaaaaatcattatttcaaccaacttaacaccatctcaaataggaaatacttacactcaaagaactctctctagaatcttagataagtttaggattttagaatttactggagatgatttgagatgggaaagatttaaataaaatagcccttaaaaaacatttttttatttttaaatagagaggtaagagcaaacttgcttctctgtttaaaacttatgccacataaattaaaacatattttttatttttctatttacatatctaatgtatcttaatctaacaaatcatttacattcttagtagtctatatttattgatactataaattaaatttgctatattacataatactatgctagaatgattctaaattttatatttaaaactatcacattgcaagtaattcaaaattttgttgtatgtttaatttcatttttaatacaataaaaatgaaattaaaaaaagatacttaaaagtatcctgtaacatagaaaattatattaatttgaatttatgtactttgtggagctggtgataggaatcgaacctacaacctgctgattacaagtcagctgctctaccgttgagccacaccagcatataatctagtatttatctctaattcaaaatttggtgggactaacagggctcgaacctgtgaccccctgcttgtaaggcaggtgctctcccagctgagctatagtcccatactggtgactcgtaggggaattgaacccctgttaccgccgtgaaagggcggtgtcttaacctcttgaccaacgagccatattttggtgatctatccgcgactcgaacgcgggacaccctgattaaaagtcaggtgctctaccgactgagctaatagaccacattttttcgacttttttcgtcgtttctttcactcacaagttatattatagcgtctatacaatttttagtcaatagttttttttactttttttagaatataattaaaatcatctttagccatttattttcaacaaaattctttttaaaaaacctatatgtatctacataaattcaactttaatttcagctagaatatgtataagtagctttaacttaataaaaaatcaatgtaagtcaaatataaaagagcatctctaataactataaacattatcttgagatactcttcttcaactattttaaattatttaattgataaaatattaagcaaatatatttcttcttattatagtttgagctctatttggaccaacagaaaccatatctacacttactccaactagttcttctatttttgctacatatttctttgcattttctggaaggtcatcaaagttatctatttgagttatatcttcattccatccatctaattcttcatatacaggttcacattttgctaaatcatctaatgaagctgggaaatccgttattatcttatcgcccattttataagacgtacaaacttttatcttatcaaatccagttaatacatcaagtaacataaatgaaatactagtcaatccattaactctagctgcatacttaactataactgcatcaaaccacccacatcttcttggtctaccagtagttaccccaaattcatgtccttgttctcttatcttatctccagtttcatttatttgctctgtaacaaacggtccttctccaactcttgtagtatatgcttttactataccaacaacgtcttttatcatatttggtcctatacctgcaccaattgcaaatccaccagatgttggatgagaagatgtaacaaatggataagttcctaaatctaaatctaataaagtcccttgtgctccttcaaacaatacttttttacctgctcttactgcatcatatacaataacagacgtatctgccacatattttcttatttgttctgcatatcctagatattcgttatatatagtttcaaaatcaaataattcttcttttccatatatatttttaactattttatttttagcatctatttgagcttttaattttatagcaaatttatctttatccattaagtcacatattctaataccagatctctctgttttatccatataacaaggtccaatacctttttttgttgtacctatctttaaatcgcctctggcttcttctgacaatgcatctagttctttatgatatgggaatatgacatgtgctctatcacttatttttatattttctgtacttatattatccgttttaaacatttccaattcttctaaaaatcctttagggtcaaacactattccatttccgattatattcactgtatttggatttaaaactccagatggaattagatgtaatgcgtattttttaccttctacaactaatgtatgtcctgcattatttccaccttgccctcttactactacatctgcttgagtagcaagataatctataactttacctttaccttcatctccccattgagaaccaacaattgcaactgttttcatgtaattcacctctatattttatatactctcgaacactttacttacttattctatcaaacattcgtatttttttcaacttttttagtattctccaatatttaacatatattcttctatttttgaaaactcttctttctctattatttctttttcatattttataactttttccataaatttatccacatctaaaagtttttctaatttacatatgttaattatgtttccaaagtttgtattagtcatgtttatatgatactgattatccacattattagcataaacaacaatagactctcttaaattattgtcaattactctaaataagtttatttcatcaagtactttaattatattgggatatatatattttaagcttattttttccatattattcctcctaataattaatatttatacacagataaagcaagccaaaagcttgctttatctacttattcacacttatcaacaggctatctgtggatagtgtggatagttttttagctaaatttcaatgtttggacatatttagtgacatgtatccacatttttcctgtagaaagaaaggacgttctgtggatattcgttagattataggtctctcaacttatccccaaatctttgaacttcaccaagccaaacaagttccacagaaccagtttcaccgtgtctattttttgctattattacttctcctatatttttactctcagaatcagcatgataatattcgtccctgtataagaacataactatatctgcatcctgttctattgctccagactctcttaaatcagataacataggtctatggtctgctctttgttctggtgcacgtgataactgagatagtgcaactacaggacagtttaattcttttgctaatatttttagtgaccttgatatcttagatatctcttgttgtctgctttcattattaccttcaccttccataagttgaagataatcaataagcactaaatctagtcctttttctatttttaactttctacactttgaccttagttctgatatttttataccaggagtatcatctatgtgtattttggcatctgataatactgccatagcatctataattctaggccaatcattatcattaagtgttccagtctttattttttttaattctacactagattgtgaagataacatacgttgtactaattgttccttagacatctctaagctaaatacagctacagaggcatcaccttttaaggctgcattttgaaccaagtttaaagaaaaggcagttttacccattgctggtctagctgcaattaatattaaatcagtcctttgaagaccatttatttttttgtttaaatctttaaaaccagtagttataccagtgacatcactcttgttagtatataatttttctatcatatcataggcatccatcaaaactaagtttatagatttaaaatcatcactagttttctcctgtgatatatcaaatatactcttttcagcttgttctaaaacatcttcaatcttagttgctccactatatcctagatttattatttcattagaagcttttataagctttctaagtacagacttttcttttactatatcagcatagtattttacatttgaagtcgtcggtactatagtagaaagacttgtaatataactgattcctccaatatcattaagatgcccttgttttcttagttcttctgttaatgttatcaagtctataggctcacctttattacttaaagttatcatacattcatatattattttgtgagcctctttatagaaatcatcaggctttatagtttctgtaaccgttattatagcatctttatctagaagtatagaacccaatattgattgttctgattctacactatgaggaggaattctcgtcatatcttccatcttaatcacctctagttattactgtttttcttttacatccactcttattttagtagttactttttgatgtatttttatttctacgaaagttgaacctaaagatcttattggttcatctaataatatttttcttttatctacgtctatgtctttttgtttctttaattgctcagcaatttctttagaagttattgaaccaaataatcttccaccttctcctgcttttgaatatatttctatattaatttcttccatttgcttacctaataaaactgcttcttcatactctttttgtgcttttatttctttagatttattcttttcatttaattcttttattgctacactatctgcttgcacagccatctttttaggaaataagaaatttcttgcatatccatcacttacttctttcatttctccctttttaccagttccttttacgtcttttaataatataactttcatctattcttcctcctccaaatactcctctattattttatttaccatcttataagcttcttttagagaaacattttttaactgtgctccagctatatctatgtgtcccccgcctcctaatttttccataagtacatgtacatttatttgccctaaagacctcgcacttataaatatagtatcatctttttcacctaatacaaaggaagcttctacttctttgatatttaataactcatcagcagtttgagctattataacatttatactatctatctcagtacttgaatatgctaaacatattctattattaattattttagtactttgaattatttcagcttttattatgaaatcttttacatcagaattgaagaatttctttacctctatagtatctgctccaacttttctaaggtaagaagcagcttcaaaagtcctaacacctgttttgaatgcaaagtttttagtatctagacttatacctgctaaaagcccttcagctgtaagtttatttattgttacatcttcatccatatactgaactaactctgtaaccatttcacacgttgaggatacatatatctcatggaataaaagcactgcatcatttataaactccacacctcttctatgatggtctataactactaccttctctgatagctttaacagttcttcacattcagtataatttggtctatgagtatcaactactacaactaatgtatttttagtacagttgtcaatagcttcctcttttccaataaacagctttttatagtaattattttcatttattttatttataaatatttctatagattcatttacagattgtaaaactatgtttgcagttttgttacaggatttacatatatcataaacaccaactgctgctcccatagcatccatatcaggatatttatgccccattatataaacttggtcactttgttgtataacctctcttaaagcatgacctattaatctggattttactttggttttcttttctacagctttagattttcctccataaaacacaaatttatcttttgtttttacaacagcctgatcaccacctctaccaagtgctaaatcgagagcacccgtagcaagttttaggttctcatttaatgtatctccatctataccaattcctatacttatagtaacaggaagattatttccataatcaatatgtcttattgtatctaaaatagaaaacttctcagcttccaatttttttagctcttttttatgcattaccaagaagaatttgtcttttgaagttcttctcaatgcaccatttgaatttaattctaaagcagaaagtattttctctacttcaacattaattaaagctctcttatcttctgctgcactttttaatacttcatcatatccatctacttgtattagcatcattgcatttttttcatcatcataattttgttttacttttaaatattcagtcttgtctatccagtataatatcatcaaatatttaggatttttttcttgatcattttttataacattataaattattgtatattctttttctttatagtttatttctgtgtacatctctttattttcatttaatacttttcttaaattaagatttttaactatatcctctatatttttatcaagtaaatctttttgaccaatcatatcataaaactttccattataccaggatatatttccatcaaattctaaaatacataatggtattggaagatttattatggcttttttagttgtttcatctatatctaaagataaattttgaatatactctgtccattcatgacgtctaatattagtagttctccaattgtgaaaaaccatatatacaaaaatacagaaaaataaacaccctacatacaagttgtaataaagcaaaattatactagaaataccaataacaattatatataaatttatttctggcatatttaatttaaaggtttgtttgttactcatttctatcctcctaagtggatttatagcttcttacctttctaaagtcaattatactatctaccataccaacaaaagatattcccataaatccaaataaacataaaattatccctgaaaaaaacataattttatttggtccctgtcttatccatttctttaagaaataaatgcaaactgctataccttgaattacaaacattaaattaaaaactagctgtaaattagtcattattaattctgtatataattttgaaccaataatttgaataaataagactaataaataaagtaagaaagttgtgagtatagcatttcctggtaaataaaaatcagcaaatttaggaaatcttatattcatctttgtaatcctttttataaaaaatacactcaaataatatgtgacaaacgctgataacaacccttgtaaaaataacatcattggtagcatatttgtaaaataacttacaatctcatctggcttcattttatcaaacactttaagttcagttgcagaaaaactatttttttgaatatttacaatttctgatatcatcttagaaacttcatctaatagattcacatttaaaaatgtctttaatacaaaaaaatatacaagcattgaaagtacaaatattatggttccaccatatatcggttcgaatttattactgtcctcttgttcaaagcttctctttagcatctttcctattactatacctggtaaagaatacattatacatatatttaatgcataagaaatgtctgcaaatagaatcagtacacaaaatgtaaccaaaatagatataagagaatactttctatcagtaatagcacctataattacatatggaacagctgctaacatactaaatattcctagcattggaatataggctattactaaagcgattattatagctaaaactattatagacattgccttagatagtctaattttattattcaatttaatatcactccctattatccatatgtttttttaaattagataaatctccataccatctttcaacgctatggtcctcatctataccaatttttattttttccttgactttataatccacatctctaaaactaattcctaatctctttgctaagagatatgttatcattattatatttgctaaagtatcttgaattgcttcatctaatggttttacccctttaaacaataaattaaacaaatcacttacactcattaatatttctgttttcatccattctattatctttatgtttctcgttatctcagaacctttatctattttcacgtttacaaccctccttaatatataatattatatcataaataataatatatttaagtatataaacaaaaaaacgagctttatagctcgcctcatttagatatataaatacatataataaaaaatgagcacaaggctcatttttttagtctaatgtatatggtaaaagtgctatatttctcgctctttttatagcaactgttaattctctttgatgcttagcacaagttccagatattcttcttggtaatatctttcctctttcagttatatacttttgtaatctttgagtacttttgtaatctattttagcgtttttgtcagcacaaaattgacaaactctttttttcttacgtcttttcttattcatcatgacttttttccctcctttttaaaatggtatatcgtcatcatctatagcttgaaaaccttgtgggtctaaaccttgaggttcaaagcttggctcaaaagctggagcactctctctatatgaattttccgatttatttttactatccaaagcttgtactgatctagtacttacttttgtaaaagttctcttttcacctgattgtgtctgataattgtctactcttatagatccttgaagtgctactaatctacctttagttatgtagttagcacaaaattcagcagatttccccattacttcaacaggtataaaatcagtttctttagatccatctttttttacatagtctctatcaatggctattgtaaaggatgccactggtgttcctgtacctgggatgtatcttaattcagggtctctagtcaaccttcccactaatacaacttgattcataaaaacaccacctattttttataataaaaccagttattaagcaacaactatcatgtgtcttattacgttttcatttatctttaagtttctgtctatctctttaggaacgtctactgctgatttgaagttaactaatacatagaaaccttctgtaaacttagctattggataagctaattttttagttccccaagtatcaactttaactatttctccgtcagttgcaacaacttccttaactttgtttagtatagcctctcttacttcttcatcagaatttggctttaccacataaactaattcataatttctcactataattcacctccctttggacttaacggctctacactcttagagcagagaaatgagactaaaatctcatacctacacattttatcatttattcttatttctgtcaatttaaattttggacaaagtttagtataaggtgaattatatacttttcaaacaaacaagggatggcaacaaccatcccttgtattatatataagttattatttttaattaagcttctacacccatagcttcttttaatacagctgctatattttttataccttctattattttttcttctggcatatttgaatagttaagtctgaaagtattttctctaccaccattagggaagaatcctcctccagcaacataagcaacattcttctctaaacattttggcattaattctttagcatttaaattacttggaagctctacccatgtaaataatccaccttctggatgagtaaatactaatccttctgggaactcttcttccatagtcttaagcattacatctctacgtttaacataaactgcttttattttgtcaacatgtgcatctaggtcatacatatccataaatttgcttacttccatttgagatatagttgatgcttgtaagtctgcaccttgttttgcaaagttaaatttagataaaatttctggagaagcacaagtccatcctaatctgtatcctgggcagaatattttagagaaagttcctaagaatattactaatccttttgtatccattgattttaaagatggtaaagtctctccttcaaatcttaaatctccatatggattatcttctattactggtatttcaaatttatttactatttccatgaattttttacgtctttcaagtggccaagttcttcctgttggattttggaagtcaggtattacgtaaatcatttttattctatcagttgtttctagtatcttttctaattcttccattatcattccatcagaatctgttggaacatctatgaatttaggttgataagatttaaatgcgtttatagctcctatgtaagatggactttcacataaaattacatcaccctcatcaataaatacttttcctgcaaaatctagaccttgttgagaaccacttgtaactaatatatcatctttgtttacattagttttgtttttatcattcattctagctgctattttttctcttaatggttcatatccttctgttgtagtatattgcatagctgatcttccattttcttcaagcactgcaactgatacttttttcatttcctcaactggaaataactctggagccggcattccaccagcaaaagatattatttgtggttgttgagtaagttttaaaagctcacgtatttctgatccttgtaatccttgcattctttttgcatatttaactgccataattaaagcacccccatgaaaatgttttcttcaattcttattataccaaaattttggatattaatatacggtatttgacattttttaagtgttaaatttttatcacttttttattagcttttttactctcttttctaaggtctctctatcaagcattattagccttgaacatttagtacattttatctttatatccattcccgttcttatgatttcaaactctttacacccacatgcatgttgcttttttaattcaacaatatcacctatttttaaatccattggcataaataattagcctcctaatctaacttctctacttcttttgaaccattttctaatttacttatacaataaattccttttatatctacattattttcaaccaaaatagtttttatcttttccatatcttcaaaagaaaatttaattgatattccacaacttgctgttatttctcttggtgttggaagagccattacttttagactattttcaccaaataacttttctgatcttatcgcatgatgtgtcgaattaaatgacactatatacatttgattcattacttaatcctttctgactatctatttgagttaatctttattattagttttatattattaaacaaacatacattatatagaaatggtatttgatgcattctttaatgtctcaactatagtatacatatttgtaactgtacctacttgtaatttgtcttttaaattataataatctaaacaagtaccacaagataaaacttctacacccatattctcaagtatttttagattttctatggtttcttcattttcagcacttaattttactcctccattaactaaaagtacatacttaggataaggtttagattctgttaatgtatatataaatccttttattaacacttttcctaattcgtcatttccaagtcccatcttatctgaagatataaatatacatgtattgtctaattcactttctttattatctacaacattttgtttatctagtatatttttaccttttctaatttctatagatataaaattctctttttcgtcaacaatatttgcttcacaacttaaagatttagcaagttttaatatattctccttagctgtttcattatcaactattgtaactacaacaccttcttctaggttatccaattctctttttgtatttataactggtttaggacaagcaagccctctcgcatctatttttatactcattgtctgattcatctccttaaaaatattcatacaatttatattttatcatagatattatcttgcttgttatagattgtttctatacccttataggtttatttaccctacattatttctaaatttttgtacataaatacacctttttgataatattctaactctttttcttttgatatatttgaatataattgacctaagtctatatataaattggccaatattctattgttgcctaaatctgatactatttttatgcatttaatcagatattcaattgcaagagttacttcattctgatttttatacatattagcatagaatctcaatgctttatattcattgaatttatttttattttttattgatgaagctaaggctatcttacaatattttctagctaaatcataatcttctttatctatatatgcttctattatcttaaataatcctgacatcatgtattcatcttcatcatttttctttatgtcatataccttttgtgaatattcaagtactctatctgtttcacctatttttctgtaaacatcacaaattgttaaatacacatttgctaatccagttttattatcctcactctcaagtatttttagtgcttttttaaagtaatctcttgattcttcatattttccaatctcaagcatattatttgcttttaacaccaaaatatcgacatcttcttttctatcatttctattatctatttcatttatcttttctatgtacttcaatgacatatttggattatctagttttatgtaacaatatgccatcttactatatagttccttgtgtatgttaacatcctcaaatttattctctgacaaaatttcctctgcaaaattaaagtggcttatagcacctttataaaagtcttcctgcatatatattttccctatgtttaaataacacttaagtatattttcactatcactattttttataaagaagtacaatgccttttcaaagttttctatagcatcattataattagattttttcaaattaatattagccattaaaaaattacatctgccatagttctccattaaatcgtatctcttacatatatctaaaacttcttttatttgatcctcagccttgtttaattcattttcttttatataaatttcgctctgtagtattaaattatcagttatcttttttgattgcatttccttggtctctaataagtattctacacttacatctagcttatcgcctagatattccaacagttcataactagtatgagatttatccctctctatatggcttatttgtgctgctgttatcctatctccagctaattcttttaatgtcatgtttttttcttttcttaattttttaatcttttctcctaagctcaaaatttccatactattcccaccttttgaagacatttttttataatataattataacttatatttattttaaaaacactacttttattttacaatattttcactgtacattaaatgatttcccataaaaatgactaaaatttagtttattttgagttttattaatttaaataaatcattttttaaatttgttactattttgtattcatatatttgctcataacgactataattatatataagaatagtttttaagagaggagaaatttttatgaaaaataagaaaataatgttagtgttaagtatattatctatatctatattcgcagttggttgtactaatgctcaaaatggaagtgatacatctaaaaaagaaactaagagcaatacaaatgttgaacaaccaaaagaagaaaacaatactgaaaaagaggttcctaataacaaagctaaacctactccaaaagaagaaactaaaactcaatcagctactatttactcttttgatgtagataagacagatttaattgaaaataaagttgatttaaataaaattgatgagaacactttatttgaagaacttcaaaaacttaaagttgttccagaatctgcaaaattaaattcatttactacaaaagacattgatggtgtaaaaactggtatattagatgttagctctgactttacaaagtcaaacttaggtagtgatgcagaaactttaatgcttgattcagttgctcgtacttacataaaaaatatgaatgttgaacaaataaaaattactgttgatggttctaattacgaaagtggtcatatagttcttgaagaaggagattacttaaagtaatttcttgaaacaattatcaaatagattagaggttcttaggagccccttttcttttttgtacaaaaaaggagatgattcaaatttttattttgaaatatcccctttttttatttctatattattaaatctcatgctatttattttttgaaatttttttcaaagcttccactgctttatctatctcatcttttgtgttgaaatatcctatactgaaccttactgcaccttgttttaaagtacctaaagtggtatgtgctagtggtgaacaatgtattcctgatctagttgctatattataatcactatctaataagaaagtaacctctccagaatccatatctcctatatttagagcgattactgatgctctttttttactatcctttggtccatatatctttatatctgatacttcctctagtttgtctatcatatattgacataattcttcttcatgttgtcttatattgttgattcctctttcaaatataaatagtataccttggttaagacctgctatacctggagtattatgagttcctgattcatacttatctgggaataactctggttgaactatttcttctgatttactacctgttccaccttcttttaatatatttaagttcaacccttctcttacatataatatacctgttccttgaggcccaaataagcatttatgacctggcattgccaacatatctatattacattcatttacgtctatatcataaacacctgctgtttgtgatgcatctactaaaaatagtatattatgttttttagctatttctccaactttttttatatctattaaagttccacatacattagatgcgtgtgttgttacaatcagtttagtattactctttattgatttttctaaatcttcataatctaaaaatccctcataatcgcattttactacagtattttcaataccccttttttccaatgcttttataggtcttattactgaattatgctccatagacgttgttattacatggtctccttcttgtaatacaccttttatcgctaaatttaaagaatctgttgcattagatgtaaatactatattcataggattacttacattgaacaacttagctatattctctcttgtatcatatatctccctagcagctctcatagcaagtttatggcctgctctacctggatttgcacaataatttttcatacaatctaaaacagcattatacactctttctggttttggatatgtagttgcagcattatctaaataaatcataacaatcttcctctctgttttatatttttgttctattcaagaagcattgatacaatactatttaaatcatcatcattatagtattctatctctattttacctttcttctttcctttagaaatattcacctttgttccaaatatatttctaagtttatcttcaacatctaaaataaatacatccttaggtttagattttttaggttcttcttgtttattttcagatatttttttagctatattttcgacttctcttacagaaagttcttcttcttctatctttttcgctatttgaagttgcaaatctttatctgcaattctcaataaagccttaccatggcctgctgtaattctaccactgtctatcatttctataacatcttgtccaagatttaaaagtcttagtgtattagttatatgaggtctactcttcccaacagcttctgatatttcttcctgagttacattgtaatgctctattaaactcttatatgctagagcctcttctattgaatttaaatcttccctctgtaagttttcaattaaggctatctccattatatctttcatatctatatctttaattatagcaggtatttgatttttatttgcaagttttgatgctctaaatcttctttctccagctattatcatatatttattattttcatccattttaaccactattggctgtaaaacaccataattttttatagagtccgacaatacttttatcttttcttcatcaaattgctttctaggttgaacttcgtttggatatattttgtctatatctatgttgactatttctttttctgaagtttctcctttaatttctggtatcaatgcactaagacctctacctaatctattacttcttttagacttattctccatactaccattcctcctcttctaaatctataaattcttctgctagctccaaataagctacagaccctctacatcttttatcataataaattacaggttttccatgacttggagcttctgcaagtcttacatttcttggaattaaagttgtatatacactacctttaaagtatttcttaacttcttcaactacttgtattgataaattagctcttccatcaaacatacttaaaacaacaccttgaatttctatatcagcatttaatcttgattttactaattttatagtctccattaattgactaacaccttctaaagcataatattcacattgtattggaattaaaacactatctacagcagttaaacaatttattgtaagcatccccagtgagggtggacaatctaaaaatatataatcatattcatctattaccgcttttatggaattttttaaaatatactctctattagttttagatgtaagctctatctctgcacctgatagttcagtagctgatggaactacatctacattctcaaattcagtacttattattgcttctttaatatgtaacccatctaacataatttcatagattgtattttctacttcgtttttattaataccatatccactagttgtatttccttgtgggtctaaatctaatactaatattttctttcccaaagttcctaagctagcacttaaatttacatttgttgtagttttcccgactccacccttttgattgaatacagctataactttgcccatgatgttcccccctttaagaattaaattaattttaaatgttgaataggtgttttttaagtataaataatgtctataaatcaatttatattacaaggcttatattacaaaaaaagattactggtaagcagtaatctctattttttagggattttcacaacaacttccatataatctcccttatctatttcattatacttagcatcaattcctgtatttgatatagcatcaaaggcctgctttatagtatttatgtaaattcttatactcatagcaccctttatattctgttttttatcaggctcttcttgaactttagtttcttctaatacatcttgtatcaatttttctgtttttttaacagtcaattcattttttatgactttgtctaacacactttgcattaaatcttcacttggtagtttaagaaatgctctagcatgtctttctgttaaattattctctattagcttcatttttatatcgtttggaagctttaatattctaagcttatttgctacagtagattgatttttgcccaatttttctgctaattgctgttgagtaaaagcatgttcttttattaagttttcataaccaattgcttcttcaatgaaatttaagtcttctcgttgcaaattttctaataacgctagaacagcagaagattcatcattcatattatttataattgctggtatggttttaagctctgctaatttagctgctcttaatcttctttctcctgcaattagttcatatttgccatcttttgctctaactgttataggttgaattataccatatacctttatagaattgctcaattcctccaatgaaacttgtgaaaatatttttcttggttgatatggatttggaactacatcttctataggtatctccataactcttttatcttccataacatacctctcttattttagatataaattatttttgttctctatatgtacatacaaatttatttctgcatctactttaataattcctttatttttgtttttttacggtaagcttaattatttcctaagaaataattaagcttaccaataataattttttcattacttttttcattacttaataggatttttagctggtctaccagcttttctagggtacttaactggtgtttccatcacctttttaaaaactaatatattatgatttaaatctacctctggtaactctacatctattttttcaatatactccaatcctaaaacatcaatagccttttgtgattcttctagctctaaattagcattcggaccttttaagcaaataaaataccctccaacttttacaaatggtacacaaaattccataagaatcggtaatccagcaacagctcttgccgtagcaacatcatatttttctctatagtcttcatttttaccaaaatcttcagctcttccatgtataaatgtaatattatctaactctagtactctactaacttcctctaaaaagtttattcttttatttaacgaatctaacaaagtaagttctaagctatctaaacatattttcaatggtattccaggaaaaccagcacctgtaccaacatctattatagacatcccattttttatatatccattctttacagctgaaatagagtctaaaaaatgttttatatacacttctttttcatcttctattccagtaagattcatctttttattccattcaactaatatctctctatagattttaaatttttctaacatactgtcattcgtatctatattaaaaccttcaatcccgtttttcagaagttctatattattcacctttgccacctctagttcttctgacttgttctaggtatataagtaaaactgatatatcagctggagaaacacccgatatacgagatgcttgccctattgaaataggttttatatcatctaatttctgtctagcctctaatctaagaccttctatagatgaataatttattttctcatccagctttttattctcaagttttttaaattggtctatttgtttcaattgtttctctatataaccttcatatttagttattattacacactgttctttaacttctcttgaaacatcttctccagcgcccttccctaattcttcaagcaattcgtaagtaacctctggtctctttaaaaattcatatagagatattccaacctttattggtgttgctcctttttcttctaacaaactatttacttcttttggtgtaactctttcattttttaatctttcaaattctttatctacagcagcctttttatttaggaacctttcatatctatcttttttaactaatcctatatcataacctttttgagttaatctcatatctgcattatcttgtcttaaatatagtcgatattctgctcttgatgtcatcattctgtaaggctcgttagttcctttagtaacaaggtcatctaataagacacctatataagcttctgaacggtctaatacaaacggctcttttccttctatctttctaactgcatttataccagccataagcccttgagctgctgcttcctcatatccagaagttccattaaattgccctgcactaaataagttctcgacaccctttatttccaaacttatttttagttgagttgggtcaacacaatcatattcaatagcatatgcaggtctcattatcttacaattttcaagtccctttatagttttgtacatatctaattgaacttcaaaaggtaaactagttgaaattccttgtatatacatttctttagtatttaacccttctggttctataaataattgatgtgaggttttatcactaaatcttactactttatcttctatagaaggacagtatcttggaccagtactttctattactccactatacatagcagacctttttaaattatccagtataactttttgagtttcttctgtagttcttgttaaataacaaggttcttgttttttttctatattttcattcataaatgagaatggagttactttttcatcgccctcttgtaaagacattacagagaagtctatactatctctatgaactcttgctggagttcccgtcttaaatcttctcattctaagaccaagctcaactaagctatctgtaagatattttgcataccccaatgcattaggaccttcataaaatgcaacttcacccatatatatctttgagttcagataaactccagtggccaatattacagctttagatttaaatgaacatcctagtttagttccaactcctattacaacatttccttcatgaagtatttctacaacttcatccatagctatatcaagatttggttcatcttctaatgtctttttcatttcttcatgatatttaaatttatctgcttgtgctcttaaagagtgtaccgctggacctttggcagtatttaacattctactttgtatatatgtcttgtctatatttaatcccatctgaccacctaaggcatctatttctttaactaattgacctttaccagtccctccaattgatggattacaaggcattaatgctatggaatccaaagacattgttattatcaaagttttatatcccattcttgcagtagccaaagcagcttcacatccagcatgtcctgctccgactactataacatcatattttcctgcttcaaactttatcatttataattcctttcttttcaaaattaatgtttcatgagaaacacttcaaattttttaaaaatctctataataaaaacaaatttacttttgtacattacttaccaatacagaaattatggaatatattatctagtaaatcctctgttactgtatcaccattaatatatccaagatagtcccatatattttttaaatcgacttctacaaagtcaaatggcatactttgttccaaagcaattaaagcatctgttgcagatttatatgctttactaagtgcatctttatgtcttgaatttgttactactaaactagaattatttttgatactacctttatataccatagactctattttatcttgcaattcttctattccttcttgttgtaaagctgatatttttattatactattattttctacatatttaagtattttttcttcttcaatctcttgtttcaaatcattcttatttaacagcactattgtttgtttatccttaagtttttctaatatctctatatcttcctctgacaactttctagatgcatctaaaaccattactatcaaatctgcactagtaaatgattctttagacttttcaacacctattttttcaacgatatcatcagtatcccttatacctgctgtgtcaacaatttttaaaggtataccttttatgtttacaaactcttctataacatctctagtagttcctggtatatcagtaactattgctctattctctcctaaaatagaattaagtagtgaagatttacctacatttggtttcccaacaattaccgtctttaagccttctctaagtatttttccactttcagctgtatcatataattttttaatctcttttttaagttcatcagttttttctttaagagtttgatatgttatatgctcaatatcttcctcaggataatctatagcaacttctacatgagctaatatctcagtgactttatctctcaattctcttatcttctttgataaagaaccctctaattgattttgagcaacttcatgagctatatcagttttggcttttataacatcaattacagcctctgcttgagataaatctattcttccatttaagaatgctcttttagtaaactcaccagcctctgctaatctaacatcttttgatagtattaattctaatatcttctttaccgaaataaatccaccatgacaattaatttctataacatcttctcctgtataggagtttggtcctttcatatatgccaataaaacttcatcaattatattttcattatccaatatatttccatatattaatgttctcttattgtattcttcaatactctttcccgacatagatttaaagatttcttctgcaaccttcaaagctctttctccacttattctaagtatacctataccaccttctccaggtgctgtagctattgctgcaattgtatcatctataaacaaatttatcacctcttaattcataattttttacatataggtttacatttaaccaatcattaatgatttaataatattaaaaaataaaaccccctaatgtttaggaggttgactttatcttttacactcaattactaatcttctatatggatcggttccttcactatatgtaattacatatttgtcattttgaagagctgaatgtattattcttctctcatatggattcatataatctaattttttagtttttcttgttttcgctacttctctagcaactttattagcatatcttattaaagattcttctcgttttgatctataattttctatatctacaagtactcttgtatgagaatctttatttattttattaagagctaatccagtcaaaaattgaatagaatctaaagtttcccctcttctaccaattaaacttgcagcttctttgccttcaatatcaaccatgattaaattatctttttgagatacattgactttggcatcaacatttgcatttttcaacattacctctataaaatttttagctacatctacttccctctcgataacaaaaatttcataagtaccatctttagcacctataaaacctaaaaaccctttacttggattttcaagtatttctacttctatatcctctgcttttaaattcaactctgctatagctttacttatagcttcctctttactcttactttttattaattttaggctttttctcattaactttttcctccttagagttagcagccagtttagcttttaaaggattcattattaagtaatattgagctattgagaataagttacttactgtccagtacaatgtaagtcctgctgggaatataaatccccaatagaaagacatacctgccattacatatgtcattactttcatagagccttgtaactgatctttgggtgtcattactttttgcatgacatatgcacttgctcctgaaaatactgctaatacataatctggtgatgttaagctttttatccataaaaacccattgtcagctgctaaaaatgcagctttgtttgcaaaaacgccatgagcaactggttctctcaaaacgctaaataatcctattaatataggaaactgtattaataaaggtaaacaaccagatagtggattaattttagcttctccatataacttaacaatttcttcattttgtttttctggcttatttttatatttttcttgtatctcttttatacgaggttgtatatcttgcattgcctttgttgacttagtctgcttaattgttaatggtaataaaataatctttacaagtatcgtaaaaagtattatagaaataccataatgattaacaaattcaaatattaccttaagaatcaatcctaagaaatttcctattatattcaatttttttatacctcctaatagttactctcttttattttagagggtcgtaacctcctggatgaaaaggatgacattttaaaagtcttcttatcgttaaatacataccttttacaaatccatattttttaaacgcctctattgaatattgtgagcaagttggataaaatctacaggtaggtccctttaagggagatatatacttttgataaaatctcactaaataaatacataaattcgataaatacctacttatttcctttaatatataaattattttattcaaagtcattaacctccatatttatagcatacaattaaatagaaatatccgttcttttaactaaattttttatagacttgtctatgtctttaaaagtagcatccttactagatacccttgctataaatactatatcatatccaggcttaattttttcatcaatatttaatctgtaggcttcttttattaatcttcttactctattcctagtaatagcttttcctactttttttgaaacagaaatacctactctactataatctgatttatttttaagtatatatattactaaatatttgtttgcaaaagatttgccgtgtttatatacttttctaaaatcagagtcttttttcaaccctttagtcctattaaagtccatagttaacctccataaacacagctatgaattgtaattatttacacaaaaaggccacctttgcagcggcccttttgtaattaatgagttaatctatttcttcctttagctcttcttctctttaacacgtttcttccgttagacgtcttcattctttttctgaaaccatgttctttacttctttgtctcttttttggttgataagttcttttactcattattttgcaccgcctttcagattttattttccgtttataaaaataataactttaccctcaaagtaaacataacacatataattataaatacttttactactgttgtcaacgagtttttgggacgcttatatcacaaaatctaccatatatatattatgtattttttttattgaaaatactagcaaaaatctatttaattttattctaaattatttttttcaattatatacacaaataaagtaattttaacatgtttatatttttatcaacaattagttaatattgtggataaattagttacaaatcattgaagtttgacatatattttgatattataaatatacttgttgataatgtgcataaatgttatcaacttattagaaattattcacagcttgtggatacttttgtgtataacttttaagattactgacaatactctagttataatcaccatttattgtatgtttatgttatttataactttatctacatattgtttatatcttttcatatttttttaataatttatactattattaatttatcaacaccattatccataaatttagttattctgtaaaatttatatatatttttgcttttctgttaataactttgtggaaaatattaattattctgttcggaggtttatatt
